(19) United States
(12) Patent Application Publication
(10) Pub. No.: US 2022/0340642 A1
(43) Pub. Date: Oct. 27, 2022

(54) DCR3 VARIANT

(71) Applicant: KYOWA KIRIN CO., LTD., Chiyoda-ku (JP)

(72) Inventors: Akiko KANAI, Chiyoda-ku (JP); Hitomi HOSOMI, Chiyoda-ku (JP); Sakiko YONEZAWA, Chiyoda-ku (JP)

(73) Assignee: KYOWA KIRIN CO., LTD., Chiyoda-ku (JP)

(21) Appl. No.: 17/642,485

(22) PCT Filed: Sep. 11, 2020
(86) PCT No.: PCT/JP2020/034444

§ 371 Date: Mar. 11, 2022

(30) Foreign Application Priority Data
Sep. 13, 2019 (JP) 2019-167728

(51) Int. Cl. C07K 14/715; A61P 37/06

(52) U.S. Cl. CPC C07K 14/7151; A61P 37/06

(57) ABSTRACT

An object of the present invention is to provide a DcR3 variant that has binding activity (preferably neutralizing activity) to a ligand of DcR3, and that results in a decreased amount of aggregates as compared to wild-type DcR3 when produced using a cell derived from a mammal as a host, and/or that exhibits improved in vivo kinetics; a DNA encoding the DcR3 variant; a vector including the DNA; a transformant obtained by introducing the vector; a method for producing a variant using the transformant; and a prophylactic or therapeutic agent for an autoimmune disease, an inflammatory disease or an allergic disease including the variant as an active ingredient, and, in order to achieve the object, the present invention provides a DcR3 variant including a part of DcR3 and a part of a TNF superfamily molecule.

### BACKGROUND OF THE INVENTION

### Field of the Invention

[0001] The present invention relates to a DcR3 variant, which is a variant of wild-type DcR3. More particularly, the present invention relates to a DcR3 variant that has binding activity (preferably neutralizing activity) to a ligand of DcR3, and that results in a decreased amount of aggregates as compared to wild-type DcR3 when produced using a cell derived from a mammal as a host, and/or that exhibits improved in vivo kinetics.

### Background Art

[0002] A tumor necrosis factor (TNF) superfamily (TNFSF) and a TNF receptor superfamily (TNFRSF) each form 18 ligands and 29 receptor families having similar structures. Antibodies and Fc fusion proteins against many molecules included in these families have been developed and launched, and have exhibited therapeutic effects in treatment of various autoimmune diseases (Non-Patent Document 1).

[0003] Although many TNFRSFs are expressed on a cell membrane and transmit a signal downstream by ligand binding, some molecules are decoy receptors (DcRs) not involved in signaling. As the decoy receptors, four types of DcR1, DcR2, DcR3 and osteoprotegerin (OPG) have been identified.

[0004] OPG is a soluble decoy receptor for RANKL and TRAIL, and inhibits signaling by competing with the binding to ligands of a RANKL receptor and a TRAIL receptor. Meanwhile, DcR1 and DcR2 are decoy receptors for TRAIL, and DcR3 is a decoy receptor for three molecules of LIGHT, TL1A and FasL, and all of the decoy receptors neutralize ligands by competitively inhibiting the binding of the ligands to a signaling receptor (Non-Patent Document 2).

[0005] DcR3 is a soluble molecule consisting of 300 amino acid residues. The N-terminal side has a signal peptide, followed by four cysteine-rich domains (CRDs) (CRD1, CRD2, CRD3 and CRD4), which are characteristic of TNFRSF, and the C-terminal side has a heparan sulfate-binding domain (HBD), which includes a heparan sulfate-binding motif and is rich in basic amino acids. All of LIGHT, TL1A and FasL bind via CRD2 and CRD3 of DcR3 (Non-Patent Documents 3, 4 and 5).

[0006] DcR3 has, in addition to a function as a decoy receptor by ligand neutralization, a function as an immunomodulatory molecule based on the activity of HBD. For example, it has been reported that DcR3 directly binds via HBD to glycosaminoglycan (GAG) including heparan sulfate on the cell membrane of monocytes, macrophages or dendritic cells, thus initiating various immunosuppressive and immunostimulatory effects such as Th2 induction by differentiation of dendritic cells, induction of M2 macrophages, enhancement of adhesion of monocytes, osteoclast differentiation, or decreased expression of MHC class II molecules (Non-Patent Documents 6 and 12).

[0007] DcR3 ligands have been reported to be involved in autoimmune diseases, inflammatory diseases, allergy, cancer, infection or other various inflammation reactions. For example, all of LIGHT, TL1A and FasL are included in the susceptibility locus in inflammatory bowel disease (IBD), and particularly, regarding TL1A, existence of a plurality of gene polymorphisms associated with pathological conditions has been known. There have also been reports of increased expression of DcR3 ligands in the blood or tissue of IBD patients, and improvement in pathological conditions by inhibition of DcR3 ligands in a mouse enteritis model (Non-Patent Documents 6 to 9).

[0008] Although expression of DcR3 in human normal tissues is at an extremely low level, the expression is induced by infection or tissue damage. Furthermore, it has been known that the level of DcR3 in blood is increased in various autoimmune diseases or inflammatory diseases such as IBD, systemic lupus erythematosus (SLE), atopic dermatitis (AD) or rheumatoid arthritis (RA). Although no DcR3 homolog has been identified in mice, improvement in pathological conditions in human DcR3 transgenic mice and drug efficacy by administration of plasmids or recombinant DcR3 have been confirmed in mouse disease models such as a type I diabetes mellitus model, a multiple sclerosis model or a nephritis model (Non-Patent Documents 6 and 10).

[0009] Genentech Inc. cloned the human DcR3 gene, and showed that a fusion of DcR3 and the Fc region of human IgG1 binds to soluble human FasL and inhibits human FasL-dependent apoptosis in vitro (Patent Document 1).

[0010] Eli Lilly and Company obtained FLINT corresponding to a protease-resistant DcR3 mutant obtained by introducing one-amino-acid mutation (R218Q) into wild-type DcR3, and reported that the in vivo kinetics thereof is more improved in mice and monkeys than that of wild-type DcR3. However, the half-lives in blood when wild-type DcR3 and FLINT were administered at 0.5 mg/kg by intravenous injection to cynomolgus monkeys were extremely short, with values of 9 hours or 12.3 hours, respectively (Patent Documents 2 and 3, Non-Patent Document 11).

### PRIOR ART DOCUMENT

[0011] [Patent Document]
[0012] Patent Document 1: JP 4303883 B2
[0013] Patent Document 2: U.S. Pat. No. 6,835,814 B1
[0014] Patent Document 3: U.S. Pat. No. 6,965,012 B1

### Non-Patent Document

[0015] Non-Patent Document 1: Nature Reviews Drug Discovery, 2013, 12: p.147-168
[0016] Non-Patent Document 2: Nature Reviews Cancer, 2002.2: p.420-430
[0017] Non-Patent Document 3: Structure, 2011, 19: p.162-171
[0018] Non-Patent Document 4: Structure, 2014, 22: p.1252-1262
[0019] Non-Patent Document 5: Structure, 2016, 24: p.2016-2023
[0020] Non-Patent Document 6: Biochemical Pharmacology, 2011, 81: p.838-847
[0021] Non-Patent Document 7: Immunology, 2009, 128: p.451-458
[0022] Non-Patent Document 8: P.N.A.S., 2006, 103: p.8441-8446
[0023] Non-Patent Document 9: Am. J. Physiol. Gastrointest. Liver Physiol., 2003, 285: p.G754-G760
[0024] Non-Patent Document 10: Journal of Biomedical Science, 2017, 24:39
[0025] Non-Patent Document 11: Drug Metabolism and Disposition, 2003, 31: p.502-507
[0026] Non-Patent Document 12: J. Immunol., 2006, 176: p.173-180

### SUMMARY OF THE INVENTION

[0027] FLINT, which is an amino acid variant of wild-type DcR3, has markedly poor in vivo kinetics, and requires frequent administration as a recombinant formulation whose mechanism of action is ligand neutralization, and this is undesirable as a pharmaceutical product. Therefore, a DcR3 variant in which a certain administration interval can be ensured by improvement in the in vivo kinetics is expected to be useful as a pharmaceutical product.

[0028] As far as is known to date, there has not been developed a functional DcR3 variant that results in a decreased amount of aggregates when expressed, isolated and purified using a cell derived from a mammal as a host, and that has neutralizing activity to a DcR3 ligand.

[0029] An object of the present invention is to provide a DcR3 variant that has binding activity (preferably neutralizing activity) to a ligand of DcR3, and that results in a decreased amount of aggregates as compared to wild-type DcR3 when a DcR3 protein is produced using a cell derived from a mammal as a host, and/or that exhibits improved in vivo kinetics; a DNA encoding the DcR3 variant; a vector including the DNA; a transformant obtained by introducing the vector; a method for producing the variant using the transformant; and a pharmaceutical composition and a prophylactic or therapeutic agent for an autoimmune disease, an inflammatory disease or allergy including the variant as an active ingredient.

[0030] In order to achieve the abovementioned object, the present invention provides the following inventions.

[1] A DcR3 variant, the DcR3 variant being a variant of wild-type decoy receptor 3 (hereinafter abbreviated as DcR3) and exhibiting improved in vivo kinetics as compared to the wild-type DcR3.
[2] The DcR3 variant according to [1], wherein the DcR3 variant comprises one or more complex N-glycoside-linked glycans.
[3] The DcR3 variant according to [1] or [2], wherein the DcR3 variant has neutralizing activity to at least one or more of LIGHT, TL1A and FasL.
[4] The DcR3 variant according to any one of [1] to [3], wherein the DcR3 variant has neutralizing activity to all of LIGHT, TL1A and FasL.
[5] The DcR3 variant according to any one of [1] to [3], wherein the DcR3 variant has no neutralizing activity to FasL and has neutralizing activity to one or more of LIGHT and TL1A.
[6] The DcR3 variant according to any one of [1] to [3] and [5], wherein the DcR3 variant has no neutralizing activity to FasL and has neutralizing activity to both of LIGHT and TL1A.
[7] A DcR3 variant comprising a first chimeric cysteine-rich region or a second chimeric cysteine-rich region, wherein:

[0031] the first chimeric cysteine-rich region consists of an amino acid sequence obtained by introducing into a cysteine-rich domain (hereinafter abbreviated as CRD) of wild-type DcR3, substitution of at least a part of the cysteine-rich domain of the wild-type DcR3 with at least a part of a cysteine-rich domain of a TNF receptor superfamily molecule other than DcR3; and

[0032] the second chimeric cysteine-rich region consists of an amino acid sequence obtained by introducing into the amino acid sequence of the first chimeric cysteine-rich region, deletion, substitution, insertion or addition of 1 to 30 amino acids.

[8] The DcR3 variant according to [7], wherein the DcR3 variant comprises one or more complex N-glycoside-linked glycans.
[9] The DcR3 variant according to [7] or [8], wherein the DcR3 variant has neutralizing activity to at least one or more of LIGHT, TL1A and FasL.
[10] The DcR3 variant according to any one of [7] to [9], wherein the DcR3 variant has neutralizing activity to all of LIGHT, TL1A and FasL.
[11] The DcR3 variant according to any one of [7] to [9], wherein the DcR3 variant has no neutralizing activity to FasL and has neutralizing activity to one or more of LIGHT and TL1A.
[12] The DcR3 variant according to any one of [7] to [9] and [11], wherein the DcR3 variant has no neutralizing activity to FasL and has neutralizing activity to both of LIGHT and TL1A.
[13] The DcR3 variant according to any one of [7] to [12], wherein the TNF receptor superfamily molecule is OPG.
[14] The DcR3 variant according to any one of [7] to [13], wherein:

[0033] the at least a part of the cysteine-rich domain of the wild-type DcR3 is selected from a part or a whole of CRD1, a part or a whole of CRD2, a part or a whole of CRD3 and a part or a whole of CRD4; and

[0034] the at least a part of the cysteine-rich domain of the TNF receptor superfamily molecule is selected from a part or a whole of CRD1, a part or a whole of CRD2, a part or a whole of CRD3 and a part or a whole of CRD4.

[15] The DcR3 variant according to [14], wherein the first chimeric cysteine-rich region comprises one or more substitution selected from:

[0035] substitution of the part of the CRD1 of the wild-type DcR3 with a part of the CRD1 of the TNF receptor superfamily molecule, wherein the part of the CRD1 of the TNF receptor superfamily molecule corresponds to the part of the CRD1 of the wild-type DcR3;

[0036] substitution of the whole of the CRD1 of the wild-type DcR3 with the whole of the CRD1 of the TNF receptor superfamily molecule;

[0037] substitution of the part of the CRD2 of the wild-type DcR3 with a part of the CRD2 of the TNF receptor superfamily molecule, wherein the part of the CRD2 of the TNF receptor superfamily molecule corresponds to the part of the CRD2 of the wild-type DcR3;

[0038] substitution of the whole of the CRD2 of the wild-type DcR3 with the whole of the CRD2 of the TNF receptor superfamily molecule;

[0039] substitution of the part of the CRD3 of the wild-type DcR3 with a part of the CRD3 of the TNF receptor superfamily molecule, wherein the part of the CRD3 of the TNF receptor superfamily molecule corresponds to the part of the CRD3 of the wild-type DcR3;

[0040] substitution of the whole of the CRD3 of the wild-type DcR3 with the whole of the CRD3 of the TNF receptor superfamily molecule;

[0041] substitution of the part of the CRD4 of the wild-type DcR3 with a part of the CRD4 of the TNF receptor superfamily molecule, wherein the part of the CRD4 of the TNF receptor superfamily molecule corresponds to the part of the CRD4 of the wild-type DcR3; and

[0042] substitution of the whole of the CRD4 of the wild-type DcR3 with the whole of the CRD4 of the TNF receptor superfamily molecule.

[16] The DcR3 variant according to [15], wherein the part or the whole of the CRD2 of the wild-type DcR3 is maintained in the first chimeric cysteine-rich region.
[17] The DcR3 variant according to [15] or [16], wherein the part or the whole of the CRD3 of the wild-type DcR3 is maintained in the first chimeric cysteine-rich region.
[18] The DcR3 variant according to any one of [14] to [17], wherein the first chimeric cysteine-rich region comprises the following amino acid sequence (a), (b), (c) or (d), and the second chimeric cysteine-rich region comprises the following amino acid sequence (e):
(a) an amino acid sequence obtained by introducing into the amino acid sequence of the cysteine-rich region of the wild-type DcR3, substitution of the CRD1 of the wild-type DcR3 with CRD1 of OPG;
(b) an amino acid sequence obtained by introducing into the amino acid sequence of the cysteine-rich region of the wild-type DcR3, substitution of the CRD4 of the wild-type DcR3 with CRD4 of OPG;
(c) an amino acid sequence obtained by introducing into the amino acid sequence of the cysteine-rich region of the wild-type DcR3, substitution of the CRD1 of the wild-type DcR3 with CRD1 of OPG, and substitution of the CRD4 of the wild-type DcR3 with CRD4 of OPG;
(d) an amino acid sequence obtained by introducing into the amino acid sequence (a), (b) or (c), substitution of a part at positions 103 to 123 from the N-terminus with a corresponding part of an amino acid sequence of a cysteine-rich domain of OPG; and
(e) an amino acid sequence obtained by introducing into the amino acid sequence (a), (b), (c) or (d), deletion, substitution, insertion or addition of 1 to 30 amino acids.
[19] The DcR3 variant according to [18], wherein:

[0043] the amino acid sequence (a) is an amino acid sequence consisting of amino acids at positions 1 to 164 from the N-terminus of the amino acid sequence set forth in SEQ ID NO: 26 or 50;

[0044] the amino acid sequence (b) is an amino acid sequence consisting of amino acids at positions 1 to 164 from the N-terminus of the amino acid sequence set forth in SEQ ID NO: 28 or 52;

[0045] the amino acid sequence (c) is an amino acid sequence consisting of amino acids at positions 1 to 164 from the N-terminus of the amino acid sequence set forth in SEQ ID NO: 30 or 54; and

[0046] the amino acid sequence (d) is an amino acid sequence consisting of amino acids at positions 1 to 164 from the N-terminus of the amino acid sequence set forth in SEQ ID NO: 32 or 56.

[20] The DcR3 variant according to [18] or [19], wherein the amino acid sequence (e) comprises one or two or more substitution selected from the group consisting of:

[0047] substitution of Glu at position 57 from the N-terminus of the amino acid sequence (a), (b), (c) or (d) with another amino acid;

[0048] substitution of Arg at position 58 from the N-terminus of the amino acid sequence (a), (b), (c) or (d) with another amino acid; and

[0049] substitution of Arg at position 60 from the N-terminus of the amino acid sequence (a), (b), (c) or (d) with another amino acid

[21] The DcR3 variant according to any one of [18] to [20], wherein the amino acid sequence (e) comprises substitution of Glu at position 57 and Arg at position 58 from the N-terminus of the amino acid sequence (a), (b), (c) or (d) with other amino acids.
[22] The DcR3 variant according to any one of [18] to [21], wherein the amino acid sequence (e) comprises one or two or more substitution selected from the group consisting of:

[0050] substitution of Glu at position 57 from the N-terminus of the amino acid sequence (a), (b), (c) or (d) with Lys, Leu, Arg, Val, Ala, Phe, His, Ile or Met;

[0051] substitution of Arg at position 58 from the N-terminus of the amino acid sequence (a), (b), (c) or (d) with Asp, Glu or Thr; and

[0052] substitution of Arg at position 60 from the N-terminus of the amino acid sequence (a), (b), (c) or (d) with Lys.

[23] The DcR3 variant according to any one of [18] to [22], wherein the amino acid sequence (e) comprises substitution of Glu at position 57 from the N-terminus of the amino acid sequence (a), (b), (c) or (d) with Lys, Leu, Arg, Val, Ala, Phe, His, Ile or Met, and substitution of Arg at position 58 from the N-terminus of the amino acid sequence (a), (b), (c) or (d) with Asp, Glu or Thr.
[24] The DcR3 variant according to any one of [18] to [23], wherein the amino acid sequence (e) comprises substitution selected from the following (f) to (i):
(f) substitution of Asn at positions 131 and 144 from the N-terminus of the amino acid sequence (b), (c) or (d) with other amino acids;
(g) substitution of Asn at positions 131, 144 and 157 from the N-terminus of the amino acid sequence (b), (c) or (d) with other amino acids;
(h) substitution of Thr at position 133 and Ser at position 146 from the N-terminus of the amino acid sequence (b), (c) or (d) with other amino acids; and
(i) substitution of Thr at position 133, Ser at position 146 and Thr at position 159 from the N-terminus of the amino acid sequence (b), (c) or (d) with other amino acids.
[25] The DcR3 variant according to any one of [18] to [24], wherein the amino acid sequence (e) comprises substitution selected from the following (f′) to (i′):
(f′) substitution of Asn at positions 131 and 144 from the N-terminus of the amino acid sequence (b), (c) or (d) with Ser;
(g′) substitution of Asn at positions 131, 144 and 157 from the N-terminus of the amino acid sequence (b), (c) or (d) with Ser
(h′) substitution of Thr at position 133 and Ser at position 146 from the N-terminus of the amino acid sequence (b), (c) or (d) with Ala; and
(i′) substitution of Thr at position 133, Ser at position 146 and Thr at position 159 from the N-terminus of the amino acid sequence (b), (c) or (d) with Ala.
[26] The DcR3 variant according to any one of [18] to [25], wherein the amino acid sequence (e) is an amino acid sequence consisting of amino acids at positions 1 to 164 from the N-terminus of an amino acid sequence set forth in SEQ ID NO: 58, 60, 62, 64, 66, 68, 70, 180, 182, 184, 186, 188, 270, 272, 274, 276, 278, 280, 282, 284 or 286.
[27] The DcR3 variant according to any one of [7] to [26], wherein the DcR3 variant is a DcR3 variant comprising the first or second chimeric cysteine-rich region, and a part or a whole of a heparan sulfate-binding domain of the wild-type DcR3 bound to the C-terminal side of the first or second chimeric cysteine-rich region, or a DcR3 variant comprising the first or second chimeric cysteine-rich region and not comprising a heparan sulfate-binding domain of the wild-type DcR3.
[28] The DcR3 variant according to [27], wherein the DcR3 variant comprises one of amino acid sequences selected from:
(I) an amino acid sequence set forth in SEQ ID NO: 26, 28, 30, 32, 34, 36, 38, 40, 42, 44 or 46, or an amino acid sequence obtained by introducing into the abovementioned amino acid sequence, deletion, substitution, insertion or addition of 1 to 30 amino acids; and
(II) an amino acid sequence set forth in SEQ ID NO: 50, 52, 54, 56, 58, 60, 62, 64, 66, 68, 70, 180, 182, 184, 186, 188, 270, 272, 274, 276, 278, 280, 282, 284 or 286, or an amino acid sequence obtained by introducing into the abovementioned amino acid sequence, deletion, substitution, insertion or addition of 1 to 30 amino acids.
[29] The DcR3 variant according to any one of [7] to [28], wherein the DcR3 variant comprises an Fc region derived from a human IgG1, IgG2 or IgG4 antibody, or a mutated Fc region consisting of an amino acid sequence obtained by introducing into an amino acid sequence of the abovementioned Fc region, deletion, substitution, insertion or addition of one or several amino acids.
[30] The DcR3 variant according to [29], wherein the Fc region or the mutated Fc region is bound to the C-terminal side of the first or second chimeric cysteine-rich region via another region or a linker.
[31] The DcR3 variant according to [29] or [30], wherein the mutated Fc region comprises substitution of Cys with Ser at EU-index position 220 of an amino acid sequence of a heavy chain of human IgG1.
[32] The DcR3 variant according to [31], wherein the mutated Fc region comprises substitution of Leu with Ala at EU-index position 234, substitution of Leu with Ala at EU-index position 235, and substitution of Gly with Ala at EU-index position 237 of an amino acid sequence of a heavy chain of human IgG1.
[33] The DcR3 variant according to [31] or [32], wherein the mutated Fc region comprises substitution of Asn with Ala at EU-index position 434 of an amino acid sequence of a heavy chain of human IgG1.
[34] The DcR3 variant according to [31], wherein the mutated Fc region comprises substitution of Met with Tyr at EU-index position 252, substitution of Ser with Thr at EU-index position 254, and substitution of Thr with Glu at EU-index position 256 of an amino acid sequence of a heavy chain of human IgG1.
[35] The DcR3 variant according to [29] or [30], wherein the mutated Fc region comprises substitution of Ser with Pro at EU-index position 228, substitution of Leu with Glu at EU-index position 235, and substitution of Arg with Lys at EU-index position 409 of an amino acid sequence of a heavy chain of human IgG4.
[36] The DcR3 variant according to [29] or [30], wherein the DcR3 variant comprises a mutated Fc region consisting of an amino acid sequence set forth in SEQ ID NO: 72, 74, 156, 158, 160, 162, 164, 166, 311, 312 or 313.
[37] The DcR3 variant according to any one of [29] to [36], wherein the DcR3 variant comprises an amino acid sequence set forth in SEQ ID NO: 76, 78, 80, 82, 84, 86, 88, 90, 92, 94, 96, 98, 150, 168, 170, 172, 174, 176, 178, 190, 192, 194, 196, 198, 200, 202, 204, 206, 208, 210, 212, 214, 216, 218, 220, 222, 224, 226, 228, 230, 232, 234, 236, 238, 240, 242, 244, 246, 248, 250, 252, 254, 256, 258, 260, 262, 264, 266, 268, 288, 290, 292, 294, 296, 298, 300, 302, 304, 314, 315, 316, 317, 318, 319, 320, 321, 322, 323, 324, 325, 326, 327, 328, 329, 330, 331, 332, 333, 334, 335, 336 or 337, or an amino acid sequence obtained by introducing into the abovementioned amino acid sequence, deletion, substitution, insertion or addition of 1 to 30 amino acids.
[38] A DcR3 variant composition comprising the DcR3 variant according to any one of [1] to [37].
[39] The composition according to [38], wherein the composition comprises a DcR3 variant having one or more complex N-glycoside-linked glycans, and a DcR3 variant not having a complex N-glycoside-linked glycan.
[40] A DNA encoding the DcR3 variant according to any one of [1] to [37].
[41] A gene recombinant vector comprising the DNA according to [40].
[42] A transformant obtained by introducing the gene recombinant vector according to [41] into a host cell.
[43] The transformant according to [42], wherein the host cell is a cell derived from a mammal.
[44] The transformant according to [43], wherein the cell derived from a mammal is a CHO cell.
[45] A method of producing a DcR3 variant or a DcR3 variant composition, wherein the method comprises culturing the transformant according to any one of [42] to [44] in a medium to generate and accumulate the DcR3 variant according to any one of [1] to [37], and purifying the DcR3 variant from the obtained culture solution.
[46] A DcR3 variant or a DcR3 variant composition produced using the production method according to [45].
[47] A pharmaceutical composition comprising the DcR3 variant or the DcR3 variant composition according to any one of [1] to [39] and [46] as an active ingredient.
[48] The pharmaceutical composition according to [47], wherein the pharmaceutical composition is a prophylactic or therapeutic agent for an autoimmune disease, an inflammatory disease or an allergic disease.
[49] A method of preventing or treating an autoimmune disease, an inflammatory disease or an allergic disease, the method comprising administering the pharmaceutical composition according to [47] or [48] to a patient in need thereof.

[0053] According to the present invention, there is provided a DcR3 variant that has binding activity (preferably neutralizing activity) to a ligand of DcR3, and that results in a decreased amount of aggregates as compared to wild-type DcR3 when a DcR3 protein is produced using a cell derived from a mammal as a host, and/or that exhibits improved in vivo kinetics; a DNA encoding the DcR3 variant; a vector including the DNA; a transformant obtained by introducing the vector; a method for producing the variant using the transformant; and a pharmaceutical composition and a prophylactic or therapeutic agent for an autoimmune disease, an inflammatory disease or allergy including the variant as an active ingredient.

### BRIEF DESCRIPTION OF THE DRAWINGS

[0054] FIG. 1A shows results of SDS-PAGE of various wild-type DcR3 controls produced using mammalian cells. DcR3 FL-Fc in lanes 1 and 3, DcR3 FL-FLAG in lanes 2 and 4, and 5195-Fc (g1S) in lanes 5 and 6 each were electrophoresed under non-reducing or reducing conditions. FIG. 1B shows that commercially available human DcR3-Fc produced using an HEK293 cell (lane 7) was electrophoresed under non-reducing conditions and detected by immunoblotting using an anti-human IgG antibody. FIG. 1C shows that commercially available DcR3 FL-Fc (lanes 8 and 9), S195-Fc (g1S) (lanes 10 and 11), DcR3 FL-Fc (g1S) (lanes 14, 15, 18 and 19) and R218Q-Fc(g1S) (lanes 12, 13, 16 and 17) produced using insect cells each were electrophoresed under non-reducing or reducing conditions. M represents a molecular weight marker (Bio-Rad Laboratories, Inc.).

[0055] FIG. 2 shows cysteine-rich domains each represented by CRD1, CRD2, CRD3 and CRD4 in the alignment of premature amino acid sequences of human DcR3 and human OPG.

[0056] FIG. 3 schematically shows respective domain structures of various wild-type DcR3 controls and various DcR3 variants produced and human OPG. A: DcR3 FL-Fc, B: S195-Fc, C: chimera A-Fc, D: 103-1230PG-Fc, E: N-linked glycan disubstitute-Fc, F: N-linked glycan trisubstitute-Fc, G: chimera B-Fc, H: chimera C-Fc, I: OPG. The vertical lines of CRD4 in E and F represent existence of two or three substitutions of N-linked glycosylated residues, respectively, and DD in I represents a death domain.

[0057] FIG. 4 shows results of SDS-PAGE of various DcR3 variants produced using mammalian cells. Chimera A-Fc (IEGRMD g1S) produced using an Expi293 cell in lanes 1 and 4, chimera A-Fc (IEGRMD g1S) produced using a CHO—S cell in lanes 2 and 5, chimera B-Fc (g1S) produced using an Expi293 cell in lanes 3 and 6, and chimera C-Fc (IEGRMD g1S) produced using an Expi293 cell in lanes 7 and 8 were electrophoresed under non-reducing or reducing conditions. M represents a molecular weight marker (Bio-Rad Laboratories, Inc.).

[0058] FIG. 5 shows melting curves by the DSF method for R218Q-Fc, S195-Fc and chimera A-Fc (IEGRMD g1S). The vertical axis represents fluorescence intensity RFU (10³), and the horizontal axis represents temperature (° C.).

[0059] FIG. 6 shows the bindings of various wild-type DcR3 controls and various DcR3 variants to human primary cells and CHO cells. To each cell, 10 μg/mL of each DcR3 variant was reacted, followed by staining with 0.1 μg/mL of a PE-labeled anti-human antibody, and the fluorescence intensity of PE was measured by flow cytometry. The vertical axis of the graph represents the geometric mean (Geo. Mean) of PE. The upper graph represents results of staining of HUVECs, the middle graph represents results of staining of hepatocytes, and the lower graph represents results of staining of CHO cells.

[0060] FIG. 7 shows the time course of blood concentration after i.v. administration of 10 mg/kg of S195-Fc and chimera A-Fc (IEGRMD g1S) in BALB/c mice. The vertical axis represents blood concentration (ng/mL), and the horizontal axis represents time after administration (h).

[0061] FIG. 8A and FIG. 8B show the bindings of various wild-type DcR3 controls and various DcR3 variants to RANKL (OPG ligand) and TRAIL (OPG ligand), respectively. After various wild-type DcR3 controls and various DcR3 variants were captured on plates to which anti-human antibodies were immobilized, RANKL or TRAIL diluted to each concentration was added, and the bindings were evaluated. For detection, a biotinylated anti-RANKL antibody or a biotinylated anti-TRAIL antibody and streptavidin-HRP were used. The horizontal axis represents the concentration (pg/mL) of RANKL or TRAIL, and the vertical axis represents absorbance (value obtained by subtracting the absorbance at 570 nm from the absorbance at 450 nm).

[0062] FIG. 9 shows the neutralizing activities of various wild-type DcR3 controls and various DcR3 variants to LIGHT. Production of IL-8 from HT-29 cells when 100 ng/mL of LIGHT and 0.1, 1 or 10 μg/mL of various wild-type DcR3 controls and various DcR3 variants were added is shown. The vertical axis represents IL-8 concentration (pg/mL), and the horizontal axis represents various DcR3 variants added as inhibitors.

[0063] FIG. 10 shows the neutralizing activities of various wild-type DcR3 controls and various DcR3 variants to TL1A. Production of IFN-γ from human T cells when 100 ng/mL of TL1A and 0.1, 1 or 10 μg/mL of various wild-type DcR3 controls and various DcR3 variants were added is shown. The vertical axis represents IFN-γ concentration (pg/mL), and the horizontal axis represents various DcR3 variants added as inhibitors.

[0064] FIG. 11 shows the neutralizing activities of various wild-type DcR3 controls and various DcR3 variants to FasL. The production amount of ATP derived from Jurkat viable cells when 100 ng/mL of FasL and 0.01, 0.1 or 1 μg/mL of various wild-type DcR3 controls and various DcR3 variants were added is represented by RLU. The vertical axis represents cell survival (RLU×10⁶) using ATP-dependent chemiluminescence as an index, and the horizontal axis represents various DcR3 variants added as inhibitors.

[0065] FIG. 12A shows the bindings of chimera A-Fc (g4PEK) and the variants (g4PEK) with low FasL binding activities to each DcR3 ligand. Sensorgrams when chimera A-Fc (g4PEK) or each of the variants with low FasL binding activities was captured on a sensor chip to which anti-human antibodies were immobilized, and a DcR3 ligand (human FasL, human LIGHT or human TL1A) as an analyte was injected are shown. The vertical axis represents resonance unit (RU), and the horizontal axis represents time (sec).

[0066] FIG. 12B shows the bindings of the variants (g4PEK) with low FasL binding activities to each DcR3 ligand. Sensorgrams when each of the variants with low FasL binding activities was captured on a sensor chip to which anti-human antibodies were immobilized, and a DcR3 ligand (human FasL, human LIGHT or human TL1A) as an analyte was injected are shown. The vertical axis represents resonance unit (RU), and the horizontal axis represents time (sec).

[0067] FIG. 12C shows the bindings of the variants (g4PEK) with low FasL binding activities to each DcR3 ligand. Sensorgrams when each of the variants with low FasL binding activities was captured on a sensor chip to which anti-human antibodies were immobilized, and a DcR3 ligand (human FasL, human LIGHT or human TL1A) as an analyte was injected are shown. The vertical axis represents resonance unit (RU), and the horizontal axis represents time (sec).

[0068] FIG. 13 shows results of SDS-PAGE of wild-type DcR3 controls produced using various mammalian cells. SDS-PAGE was performed by electrophoresing commercially available human DcR3-Fc produced using various mammalian cells under reducing or non-reducing conditions. As the mammalian cells, HEK293 cells (Abcam plc.) were used in lanes 1 and 4, CHO cells (AdipoGen Life Sciences, Inc.) were used in lanes 2 and 5, and HEK293 cells (Enzo Life Sciences, Inc.) were used in lanes 3 and 6. M represents a molecular weight marker (Bio-Rad Laboratories, Inc.).

[0069] FIG. 14A shows the proportions (%) of the contents of monomers, aggregates and degradants calculated from the peak areas in SEC-HPLC or SEC-UPLC of the Protein A-purified variants with low FasL binding activities. FIG. 14A shows results of all the produced variants (g4PEK) with low FasL binding activities.

[0070] FIG. 14B shows the proportions (%) of the contents of monomers, aggregates and degradants calculated from the peak areas in SEC-HPLC or SEC-UPLC of the Protein A-purified variants with low FasL binding activities. FIG. 14B shows results of various mutated Fc fusions of the selected variants with low FasL binding activities.

[0071] FIG. 14C shows the proportions (%) of the contents of monomers, aggregates and degradants calculated from the peak areas in SEC-HPLC or SEC-UPLC of various Protein A-purified chimera A-mutated Fc fusions.

[0072] FIG. 15A shows measurement results of the binding activities of various DcR3 variants to each DcR3 ligand by BIAcore. Various kinetic constants (ka, kd and K_{D}) when various DcR3 variants were captured on a sensor chip to which anti-human antibodies were immobilized, and a trimeric DcR3 ligand (human FasL, human LIGHT or human TL1A) as an analyte was injected are shown. FIG. 15A shows results of various chimera A-Fc variants including different Fc sequences.

[0073] FIG. 15B shows measurement results of the binding activities of various DcR3 variants to each DcR3 ligand by BIAcore. Various kinetic constants (ka, kd and KD) when various DcR3 variants were captured on a sensor chip to which anti-human antibodies were immobilized, and a trimeric DcR3 ligand (human FasL, human LIGHT or human TL1A) as an analyte was injected are shown. FIG. 15B shows results of the variants with low FasL binding activities.

[0074] FIG. 16A shows results of the kinetic constant (KD value) to each DcR3 ligand calculated by BIAcore at selection of the variants with low FasL binding activities, compared to that of chimera A-Fc (g4PEK). FIG. 16A shows results of one-amino-acid substitutes.

[0075] FIG. 16B shows results of the kinetic constant (KD value) to each DcR3 ligand calculated by BIAcore at selection of the variants with low FasL binding activities, compared to that of chimera A-Fc (g4PEK). FIG. 16B shows results of two-amino-acid substitutes.

[0076] FIG. 17A shows evaluation results of the neutralizing activities of various DcR3 variants to soluble LIGHT. FIG. 17A shows the inhibitory activities of various chimera A-Fc variants including different Fc sequences to LIGHT-dependent-CXCL10 production from IFN-γ-stimulated intestinal myofibroblasts. The vertical axis represents CXCL10 concentration (ng/mL), and the horizontal axis represents the concentration (ng/mL) of DcR3 variants added.

[0077] FIG. 17B shows evaluation results of the neutralizing activities of various DcR3 variants to soluble LIGHT. FIG. 17B shows the inhibitory activities of chimera A-Fc variants including different mutation-introduced Fc sequences to LIGHT-dependent CXCL10 production from IFN-γ-stimulated intestinal myofibroblasts. The vertical axis represents CXCL10 concentration (ng/mL), and the horizontal axis represents the concentration (ng/mL) of DcR3 variants added.

[0078] FIG. 17C shows evaluation results of the neutralizing activities of various DcR3 variants to soluble LIGHT. FIG. 17C shows the inhibitory activities of one-amino-acid substituted variants with low FasL binding activates to LIGHT-dependent IL-8 production from HT-29 cells. The vertical axis represents IL-8 concentration (ng/mL), and the horizontal axis represents the concentration (ng/mL) of DcR3 variants added.

[0079] FIG. 17D shows evaluation results of the neutralizing activities of various DcR3 variants to soluble LIGHT. FIG. 17D shows the inhibitory activities of two-amino-acid substituted variants with low FasL binding activities to LIGHT-dependent CXCL10 production from IFN-γ-stimulated intestinal myofibroblasts. The vertical axis represents CXCL10 concentration (ng/mL), and the horizontal axis represents the concentration (ng/mL) of DcR3 variants added.

[0080] FIG. 18A shows evaluation results of the neutralizing activities of various DcR3 variants to soluble TL1A. FIG. 18A shows the inhibitory activities of various chimera A-Fc variants including different Fc sequences to TL1A-dependent IFN-γ production from IL-12- and IL-18-stimulated human T cells. The vertical axis represents IFN-γ concentration (pg/mL), and the horizontal axis represents the concentration (ng/mL) of DcR3 variants added.

[0081] FIG. 18B shows evaluation results of the neutralizing activities of various DcR3 variants to soluble TL1A. FIG. 18B shows the inhibitory activities of chimera A-Fc variants including different mutation-introduced Fc sequences to TL1A-dependent IFN-γ production from IL-12- and IL-18-stimulated human T cells. The vertical axis represents IFN-γ concentration (pg/mL), and the horizontal axis represents the concentration (ng/mL) of DcR3 variants added.

[0082] FIG. 18C shows evaluation results of the neutralizing activities of various DcR3 variants to soluble TL1A. FIG. 18C shows the inhibitory activities of one-amino-acid substituted variants with low FasL binding activities to TL1A-dependent IFN-γ production from IL-12- and IL-18-stimulated human T cells. The vertical axis represents IFN-γ concentration (pg/mL), and the horizontal axis represents the concentration (ng/mL) of DcR3 variants added.

[0083] FIG. 18D shows evaluation results of the neutralizing activities of various DcR3 variants to soluble TL1A. FIG. 18D shows the inhibitory activities of two-amino-acid substituted variants with low FasL binding activities to TL1A-dependent IFN-γ production from IL-12- and IL-18-stimulated human T cells. The vertical axis represents IFN-γ concentration (pg/mL), and the horizontal axis represents the concentration (ng/mL) of DcR3 variants added.

[0084] FIG. 19A shows evaluation results of the neutralizing activities of various DcR3 variants to soluble FasL. FIG. 19A shows the inhibitory activities of various chimera A-Fc variants including different Fc sequences to cell death of A3 cells. The vertical axis represents cell survival (RLU×10⁶) using ATP-dependent chemiluminescence as an index, and the horizontal axis represents the concentration (ng/mL) of various DcR3 variants added.

[0085] FIG. 19B shows evaluation results of the neutralizing activities of various DcR3 variants to soluble FasL. FIG. 19B shows the inhibitory activities of chimera A-Fc variants including different mutation-introduced Fc sequences to cell death of Jurkat cells. The vertical axis represents cell survival (RLU×10⁶) using the production amount of ATP as an index, and the horizontal axis represents the concentration (ng/mL) of various DcR3 variants added.

[0086] FIG. 19C shows evaluation results of the neutralizing activities of various DcR3 variants to soluble FasL. FIG. 19C shows the inhibitory activities of one-amino-acid substituted variants with low FasL binding activities to cell death of Jurkat cells. The vertical axis represents cell survival (RLU×10⁶) using the production amount of ATP as an index, and the horizontal axis represents the concentration (ng/mL) of various DcR3 variants added.

[0087] FIG. 19D shows evaluation results of the neutralizing activities of various DcR3 variants to soluble FasL. FIG. 19D shows the inhibitory activities of two-amino-acid substituted variants with low FasL binding activities to cell death of Jurkat cells. The vertical axis represents cell survival (RLU×10⁶) using the production amount of ATP as an index, and the horizontal axis represents the concentration (ng/mL) of various DcR3 variants added.

[0088] FIG. 20A shows evaluation results of the binding activities of S195-Fc and various chimera A-Fc variants including different Fc sequences to cells of a membrane-bound LIGHT forced expression cell line. To each cell, various DcR3 variants were reacted, followed by staining with a PE-labeled anti-human antibody, and the fluorescence intensity of PE was measured by flow cytometry. The vertical axis of the graph represents the geometric mean (Geo. Mean) of PE.

[0089] FIG. 20B shows evaluation results of the binding activities of S195-Fc and various chimera A-Fc variants including different Fc sequences to cells of membrane-bound TL1A and membrane-bound FasL forced expression cell lines. To each cell, various DcR3 variants were reacted, followed by staining with a PE-labeled anti-human antibody, and the fluorescence intensity of PE was measured by flow cytometry. The vertical axis of the graph represents the geometric mean (Geo. Mean) of PE.

[0090] FIG. 21A shows evaluation results of the binding activities of S195-Fc, various chimera A-Fc variants and the variants with low FasL binding activities to cells of a membrane-bound LIGHT forced expression cell line. To each cell, various DcR3 variants were reacted, followed by staining with a PE-labeled anti-human antibody, and the fluorescence intensity of PE was measured by flow cytometry. The vertical axis of the graph represents the geometric mean (Geo. Mean) of PE.

[0091] FIG. 21B shows evaluation results of the binding activities of S195-Fc, various chimera A-Fc variants and the variants with low FasL binding activities to cells of a membrane-bound TL1A forced expression cell line. To each cell, various DcR3 variants were reacted, followed by staining with a PE-labeled anti-human antibody, and the fluorescence intensity of PE was measured by flow cytometry. The vertical axis of the graph represents the geometric mean (Geo. Mean) of PE.

[0092] FIG. 21C shows evaluation results of the binding activities of chimera A-Fc and the variants (g4PEK) with low FasL binding activities to cells of a membrane-bound FasL forced expression cell line. To each cell, various DcR3 variants were reacted, followed by staining with a PE-labeled anti-human antibody, and the fluorescence intensity of PE was measured by flow cytometry. The vertical axis of the graph represents the geometric mean (Geo. Mean) of PE.

[0093] FIG. 22 shows evaluation results of the binding activity of chimera A-Fc to membrane-bound LIGHT of a primary cell. FIG. 22A shows measurement results of the expression level of membrane-bound LIGHT on activated human T cells by a PE-labeled anti-LIGHT antibody. FIG. 22B shows the geometric mean (Geo. Mean) calculated by measuring the binding of Alexa Fluor 488-labeled chimera A-Fc to membrane-bound LIGHT on activated human T cells by flow cytometry. In both figures, the vertical axis represents the geometric mean (Geo. Mean) of fluorescence intensity.

[0094] FIG. 23 shows evaluation results of the binding activity of chimera A-Fc to membrane-bound TL1A of primary cells. FIG. 23 shows the geometric mean (Geo. Mean) calculated by measuring the binding of Alexa Fluor 647-labeled chimera A-Fc in the presence or absence of competitive proteins to membrane-bound TL1A on HUVECs by flow cytometry.

[0095] FIG. 24 shows measurement results of the binding activity of chimera A-Fc to FasL derived from primary cells by sandwich ELISA to soluble FasL in culture supernatants of human T cells stimulated for AICD. The figure shows the value of absorbance at 450 nm when a culture supernatant was added to a plate on which chimera A-Fc (FIG. 24A) or Fas-Fc (FIG. 24B) was captured, followed by detection with an anti-FasL antibody.

[0096] FIG. 25 shows results of the elution times (minute) of various chimera A-Fc variants including different Fc sequences and the variants with low FasL binding activities in hydrophobic interaction chromatography (HIC).

[0097] FIG. 26 shows results of the Tm values (° C.) calculated by the differential scanning fluorimetry (DSF) method of various chimera A-Fc variants including different Fc sequences and the variants with low FasL binding activities.

[0098] FIG. 27 shows the values of the half-life in blood (h) during the elimination phase and the area under the concentration-time curve to infinity AUCO-∞ (μg*h/mL) after i.v. administration of 10 mg/kg of chimera A-Fc (Eg1S) including a different Fc sequence and the variants with low FasL binding activities in BALB/c mice.

[0099] FIG. 28A shows indices of gross pathological scores in a drug efficacy study of chimera A-Fc using a mouse acute xenogeneic GVHD model.

[0100] FIG. 28B shows pathological scores for each individual of each group and as a mean of each group. The vertical axis represents the pathological score, and the horizontal axis represents each treatment group.

[0101] FIG. 29 shows the cell count per spleen for each individual of each group and as a mean value of each group regarding human CD45-positive cells, human CD3 and CD4-positive cells, and human CD3 and CD8-positive cells in a drug efficacy study of chimera A-Fc using a mouse acute xenogeneic GVHD model. Group 1 represents no human cell transfer, group 2 represents a group of administration of anti-DNP antibody with human cell transfer, and group 3 represents a group of administration of chimera A-Fc with human cell transfer. The vertical axis represents each surface marker-positive cell count, and the horizontal axis represents each treatment group.

[0102] FIG. 30A shows measurement results of the binding activities of various DcR3 variants to human DcR3 ligands by BIAcore. Various kinetic constants (ka, kd and K_{D}) when a trimer of human FasL, human LIGHT or human TL1A was used as a human DcR3 ligand are shown.

[0103] FIG. 30B shows measurement results of the binding activities of various DcR3 variants to cynomolgus monkey DcR3 ligands by BIAcore. Various kinetic constants (ka, kd and K_{D}) when a trimer of cynomolgus monkey FasL, cynomolgus monkey LIGHT or cynomolgus monkey TL1A was used as a cynomolgus monkey DcR3 ligand are shown.

[0104] FIG. 31 shows evaluation results of the neutralizing activities of various DcR3 variants to soluble LIGHT. FIG. 31 shows the inhibitory activities of chimera A-Fc variants and the variants with low FasL binding activities including various mutated Fc sequences to LIGHT-dependent CXCL10 production from intestinal myofibroblasts. The vertical axis represents CXCL10 concentration (ng/mL), and the horizontal axis represents the concentration (ng/mL) of DcR3 variants added.

[0105] FIG. 32 shows evaluation results of the neutralizing activities of various DcR3 variants to soluble TL1A. FIG. 32 shows the inhibitory activities of chimera A-Fc variants and the variants with low FasL binding activities including various mutated Fc sequences to TL1A-dependent IFN-γ production from human T cells. The vertical axis represents IFN-γ concentration (μg/mL), and the horizontal axis represents the concentration (ng/mL) of DcR3 variants added.

[0106] FIG. 33 shows evaluation results of the neutralizing activities of various DcR3 variants to soluble FasL. FIG. 33 shows the inhibitory activities of chimera A-Fc variants and the variants with low FasL binding activities including various mutated Fc sequences to cell death of Jurkat cells. The vertical axis represents cell survival (RLU×10⁶) using ATP-dependent chemiluminescence as an index, and the horizontal axis represents the concentration (ng/mL) of various DcR3 variants added.

[0107] FIG. 34A shows evaluation results of the binding activities of various DcR3 variants to cells of a membrane-bound LIGHT forced expression cell line by flow cytometry. The vertical axis of the graph represents the geometric mean (Geo. Mean) of PE.

[0108] FIG. 34B shows evaluation results of the binding activities of various DcR3 variants to cells of a membrane-bound TL1A forced expression cell line by flow cytometry. The vertical axis of the graph represents the geometric mean (Geo. Mean) of PE.

[0109] FIG. 34C shows evaluation results of the binding activities of various DcR3 variants to cells of a membrane-bound FasL forced expression cell line by flow cytometry. The vertical axis of the graph represents the geometric mean (Geo. Mean) of PE.

[0110] FIG. 35 shows evaluation results of the neutralizing activities of various DcR3 variants to membrane-bound LIGHT.

[0111] FIG. 35 shows the inhibitory activities of chimera A-Fc variants and the variants with low FasL binding activities including various mutated Fc sequences to membrane-bound LIGHT-dependent CXCL10 production from intestinal myofibroblasts. The vertical axis represents CXCL10 concentration (ng/mL), and the horizontal axis represents the concentration (ng/mL) of DcR3 variants added.

[0112] FIG. 36 shows evaluation results of the neutralizing activities of various DcR3 variants to membrane-bound TL1A. FIG. 36 shows the inhibitory activities of chimera A-Fc variants and the variants with low FasL binding activities including various mutated Fc sequences to membrane-bound TL1A-dependent IFN-γ production from human CD4-positive T cells. The vertical axis represents IFN-γ concentration (μg/mL), and the horizontal axis represents the concentration (ng/mL) of DcR3 variants added.

[0113] FIG. 37 shows evaluation results of the neutralizing activities of various DcR3 variants to membrane-bound FasL. FIG. 37 shows the inhibitory activities of chimera A-Fc variants and the variants with low FasL binding activities including various mutated Fc sequences to membrane-bound FasL-dependent cell death of Jurkat cells. The vertical axis of the graph represents the proportion (%) of an Annexin V-positive dead cell subset, and the horizontal axis represents the concentration (ng/mL) of various DcR3 variants added.

[0114] FIG. 38A shows measurement results of the binding activities of various DcR3 variants to recombinant human LIGHT by sandwich ELISA. The vertical axis represents the value obtained by subtracting the absorbance at 570 nm from the absorbance at 450 nm, and the horizontal axis represents the concentration (ng/mL) of recombinant human LIGHT added.

[0115] FIG. 38B shows results of the binding activities of various DcR3 variants to LIGHT derived from human primary cells, measured by sandwich ELISA to soluble LIGHT in culture supernatants of human T cells. The open bar represents results using culture supernatants when human T cells were cultured without stimulation, and the solid bar represents results using culture supernatants of human T cells stimulated with an anti-CD3 antibody and an anti-CD28 antibody. The vertical axis represents the value obtained by subtracting the absorbance at 570 nm from the absorbance at 450 nm.

[0116] FIG. 38C shows results of the binding activities of various DcR3 variants to recombinant human TL1A, measured by sandwich ELISA. The vertical axis represents the value obtained by subtracting the absorbance at 570 nm from the absorbance at 450 nm, and the horizontal axis represents the concentration (ng/mL) of recombinant TL1A.

[0117] FIG. 38D shows results of the binding activities of various DcR3 variants to TL1A derived from human primary cells, measured by sandwich ELISA to soluble TL1A in culture supernatants of human PBMCs. The open bar represents results using culture supernatants when human PBMCs were cultured without stimulation, and the solid bar represents results using culture supernatants of human PBMCs stimulated with an immune complex. The vertical axis represents the value obtained by subtracting the absorbance at 570 nm from the absorbance at 450 nm.

[0118] FIG. 38E shows results of the binding activities of various DcR3 variants to recombinant human FasL, measured by sandwich ELISA. The vertical axis represents the value obtained by subtracting the absorbance at 570 nm from the absorbance at 450 nm, and the horizontal axis represents the concentration (ng/mL) of human FasL.

[0119] FIG. 38F shows results of the binding activities of various DcR3 variants to FasL derived from human primary cells, measured by sandwich ELISA to soluble FasL in culture supernatants of human T cells stimulated for AICD. The open bar represents results using culture supernatants of human T cells not stimulated for AICD, and the solid bar represents results using culture supernatants of human T cells stimulated for AICD. The vertical axis represents the value obtained by subtracting the absorbance at 570 nm from the absorbance at 450 nm.

[0120] FIG. 39 shows the values of the half-life in blood (h) during the elimination phase and the area under the concentration-time curve to infinity AUCO-∞ (μg*h/mL) after i.v. administration of 10 mg/kg of various DcR3 variants to BALB/c mice.

[0121] FIG. 40 shows results of immunoblotting detection of various DcR3 variants without Fc fusion that were transiently expressed on mammalian cells. A 30-fold concentrated solution of a culture supernatant of the cells expressing S195-His6 in lanes 1 and 5, a 6-fold diluted solution of a culture supernatant of the cells expressing chimera A-His6 in lanes 2 and 6, a 6-fold diluted solution of a culture supernatant of the cells expressing E57K-His6 in lanes 3 and 7, and a 6-fold diluted solution of a culture supernatant of the cells expressing 45-18-His6 in lanes 4 and 8 each were electrophoresed under non-reducing or reducing conditions, followed by detection by immunoblotting using an anti-6-His tag antibody.

### DETAILED DESCRIPTION OF THE INVENTION

[0122] Preferred embodiments for carrying out the present invention will be described below. The embodiments described below illustrate examples of representative embodiments of the present invention, and the scope of the present invention is not narrowly interpreted thereby.

[0123] It is possible to combine two or more embodiments of the embodiments described below, and such combinations are also included in the present invention.

[0124] The present invention relates to a DcR3 variant, which is a variant of wild-type DcR3. Specifically, the present invention relates to a DcR3 variant that has binding activity (or neutralizing activity) to a ligand of DcR3, and that exhibits improved in vivo kinetics as compared to wild-type DcR3 and/or lower aggregability as compared to wild-type DcR3 when produced using a mammalian cell, and to a DcR3 variant including a cysteine-rich domain obtained by introducing a mutation(s) into one or two or more amino acids in a cysteine-rich domain of wild-type DcR3.

### 1. Wild-Type DcR3

[0125] DcR3 is generally also referred to as decoy receptor 3, DCR3, tumor necrosis factor receptor superfamily member 6B (TNFRSF6B), TR6 or M68. DcR3 is a soluble decoy receptor that belongs to a TNF receptor superfamily and that has no transmembrane domain, and by binding to each of three ligands, i.e., LIGHT, TL1A or FasL, DcR3 competitively inhibits the binding of each ligand to a receptor, thus neutralizing the ligand. As a different function from neutralization of a ligand, it has been reported that DcR3 directly binds via a heparan sulfate-binding domain (HBD) to glycosaminoglycan (GAG) including heparan sulfate on the cell membrane of monocytes, macrophages or dendritic cells, thus initiating various immunosuppressive and immunostimulatory effects [Biochemical. Pharmacology, 2011, 81: p.838-847, J. Immunol., 2006, 176: p.173-180].

[0126] Naturally occurring DcR3 includes CRD1, CRD2, CRD3, CRD4 and HBD in this order from the N-terminal side. Naturally occurring DcR3 further includes a region existing between CRD1 and CRD2, a region existing between CRD2 and CRD3, a region existing between CRD3 and CRD4, and a region existing between CRD4 and HBD. A cysteine-rich region of naturally occurring DcR3 is a region from the N-terminus of CRD1 to the C-terminus of CRD4, and includes CRD1, CRD2, CRD3 and CRD4, and further includes a region existing between CRD1 and CRD2, a region existing between CRD2 and CRD3, and a region existing between CRD3 and CRD4. “Wild-type DcR3” means a molecule including a cysteine-rich region and HBD, wherein the cysteine-rich region and the HBD of the molecule are wild-type (in other word, the cysteine-rich region and the HBD of the molecule are the same as those of naturally occurring DcR3). Therefore, in addition to naturally occurring DcR3, mutants of naturally occurring DcR3, such as gene polymorphisms and isoforms, are also included in “wild-type DcR3” as long as they include the cysteine-rich region and the HBD of naturally occurring DcR3. Premature DcR3 and mature DcR3 are also included in “wild-type DcR3”. “Premature DcR3” means DcR3 including a signal peptide, and “mature DcR3” means DcR3 from which a signal peptide has been cleaved. The signal peptide may be any of a sequence derived from naturally occurring DcR3, an artificial sequence, a sequence derived from an expression vector, and a sequence derived from another protein suitable for a host cell in which naturally occurring DcR3 is expressed. When a cleavage site is different according to a signal peptide to be used, a mature sequence having a different amino acid(s) at the N-terminus is also included in “wild-type DcR3”. The CRD of naturally occurring DcR3 and the CRD of wild-type DcR3 are also referred to as “wild-type CRD”, and the cysteine-rich region of naturally occurring DcR3 and the cysteine-rich region of wild-type DcR3 are also referred to as “wild-type cysteine-rich region”.

[0127] In the present invention, the origin of wild-type DcR3 is not limited, and examples of wild-type DcR3 include DcR3 derived from various eukaryotes. Examples thereof include DcR3 derived from amphibians such as frogs, birds such as chickens, or mammals, for example, primates including humans, or artiodactyls such as pigs and cattle. When the DcR3 variant of the present invention is used for a human, it is preferable that DcR3 derived from a human is used as wild-type DcR3. The cDNA sequence of DcR3 derived from a human is represented by SEQ ID NO: 1, and the corresponding mRNA sequence has been registered as Accession Number: NM_003823.3 in GenBank (US NCBI). The amino acid sequence of DcR3 derived from a human is represented by SEQ ID NO: 2, and has been registered as Accession Number: NP_003814.1 in GenBank (US NCBI). Premature human DcR3 includes a signal peptide at the N-terminus, followed by four CRDs (CRD1, CRD2, CRD3, CRD4), which are characteristic of a TNF receptor superfamily, and includes HBD, which is rich in basic amino acids, at the C-terminus. Mature human DcR3 is obtained by cleaving a signal peptide from premature one, and the amino acid sequence of the mature human DcR3 is represented by, for example, SEQ ID NO: 4, and the nucleotide sequence of a DNA encoding the amino acid sequence of the mature human DcR3 is represented by, for example, SEQ ID NO: 3. In the present invention, of the amino acid sequence (SEQ ID NO: 2) of human DcR3, a region at positions 30 to 70 from the N-terminus is defined as CRD1 (SEQ ID NO: 6), a region at positions 73 to 113 is defined as CRD2 (SEQ ID NO: 8), a region at positions 115 to 150 is defined as CRD3 (SEQ ID NO: 10), a region at positions 153 to 193 is defined as CRD4 (SEQ ID NO: 12), and a region at positions 196 to 300 is defined as HBD (SEQ ID NO: 48) (FIG. 2). The nucleotide sequences of DNAs encoding the amino acid sequences of CRD1, CRD2, CRD3, CRD4 and HBD of human DcR3 are represented by, for example, SEQ ID NOs: 5, 7, 9, 11 and 47, respectively. With respect to an amino acid sequence of CRD, although there are a plurality of definitions other than those mentioned above, any definition of an amino acid sequence of CRD can be used for the DcR3 variant of the present invention by using known information [UniProt 095407, GenBank NP_003814.1, Structure, 2011,19: p.162-171].

[0128] As mentioned above, examples of the ligand of DcR3 include LIGHT, TL1A and FasL, all of which belong to TNFSF.

[0129] LIGHT (lymphotoxin-like, exhibits inducible expression, and competes with herpes simplex virus (HSV) glycoprotein D (gD) for HVEM, a receptor expressed by T lymphocytes) is generally also referred to as tumor necrosis factor superfamily member 14 (TNFSF14), LTg, HVEM-L or CD258. The mRNA sequence of human LIGHT and the corresponding cDNA sequence have been registered as Accession Number: NM_003807.4, and the amino acid sequence thereof has been registered as Accession Number: NP_003798.2 in GenBank (US NCBI). Soluble LIGHT is generated by being expressed on the cell membrane as membrane-bound LIGHT, followed by shedding of the extracellular region by protease. A cleavage site in membrane-bound LIGHT is between amino acids at positions 82 and 83 of NP_003798.2. Both soluble and membrane-bound LIGHTs are functional.

[0130] Tumor necrosis factor (TNF)-like cytokine 1A (TL1A) is generally also referred to as TNF superfamily member 15 (TNFSF15), TL1, VEGI or VEGI-251. The mRNA sequence of human TL1A and the corresponding cDNA sequence have been registered as Accession Number: NM_005118.3, and the amino acid sequence thereof has been registered as Accession Number: NP_005109.2 in GenBank (US NCBI). Soluble TL1A is generated by being expressed on the cell membrane as membrane-bound TL1A, followed by shedding of the extracellular region by protease. A cleavage site in membrane-bound TL1A is between amino acids at positions 71 and 72 of NP_005109.2, and both soluble and membrane-bound TL1As are functional.

[0131] Fas ligand (FasL) is generally also referred to as FASLG, tumor necrosis factor superfamily member 6 (TNFSF6), CD178 or APT1LG1. The mRNA sequence of human FasL and the corresponding cDNA sequence have been registered as Accession Number: NM_000639.2, and the amino acid sequence thereof has been registered as Accession Number: NP_000630.1 in GenBank (US NCBI). Soluble FasL is generated by being expressed on the cell membrane as membrane-bound FasL, followed by shedding of the extracellular region by protease. A cleavage site in membrane-bound FasL is between amino acids at positions 81 and 82 or between amino acids at positions 129 and 130 of NP_000630.1. It has been reported that membrane-bound FasL is mainly a functional ligand in vivo.

[0132] In a gene encoding a protein of a eukaryote, polymorphisms or isoforms of the gene are often observed. With respect to a gene used in the present invention, a gene including a mutation introduced into a nucleotide sequence or amino acid sequence by such polymorphisms is also included in a gene encoding LIGHT, TL1A or FasL used in the present invention.

### 2. DcR3 Variant

[0133] The DcR3 variant of the present invention includes a chimeric cysteine-rich region.

### 2-1. Chimeric Cysteine-Rich Region

[0134] The chimeric cysteine-rich region of the present invention consists of an amino acid sequence obtained by introducing a mutation(s) into one or two or more amino acids in the amino acid sequence of the cysteine-rich region of wild-type DcR3. “A mutation(s) introduced into an amino acid sequence/nucleotide sequence” means substitution, deletion, insertion or addition of one or two or more amino acids/bases in the sequence. “Substitution, deletion, insertion or addition” also includes a combination of two or more mutations selected from substitution, deletion, insertion and addition. A mutation(s) is/are introduced into at least one or two or more CRDs selected from CRD1, CRD2, CRD3 and CRD4 of the cysteine-rich region of wild-type DcR3. A mutation(s) may be or may not be introduced into a region existing between CRD1 and CRD2, a region existing between CRD2 and CRD3, and a region existing between CRD3 and CRD4 of the cysteine-rich region of wild-type DcR3. When a mutation(s) is/are introduced into one or two or more regions selected from a region existing between CRD1 and CRD2, a region existing between CRD2 and CRD3, and a region existing between CRD3 and CRD4, the number of amino acids constituting each region after introduction of the mutation(s) is usually 1 to 10, preferably 1 to 7, more preferably 1 to 5, still more preferably 1 to 3, and yet more preferably 1 to 2. The amino acid sequence of each region after introduction of the mutation(s) is not particularly limited. The mutation(s) to be introduced into the cysteine-rich region of wild-type DcR3 may be a naturally occurring mutation or an artificial mutation. Examples of the chimeric cysteine-rich region in the present invention include a chimeric cysteine-rich region consisting of an amino acid sequence obtained by introducing into the amino acid sequence of the cysteine-rich region of wild-type DcR3, substitution, deletion, insertion or addition of one or two or more amino acids, and examples of such a chimeric cysteine-rich region can include first and second chimeric cysteine-rich regions mentioned below.

### 2-1-1. First Chimeric Cysteine-Rich Region

[0135] The first chimeric cysteine-rich region consists of an amino acid sequence obtained by introducing into the amino acid sequence of the cysteine-rich region of wild-type DcR3, substitution of at least a part(s) of CRDs of the wild-type DcR3 with (an)other peptide(s) or protein(s). In other words, the first chimeric cysteine-rich region includes both of an amino acid sequence derived from the cysteine-rich region of wild-type DcR3 and an amino acid sequence(s) derived from (an)other peptide(s) or protein(s).

[0136] The part(s) to be substituted with (an)other peptide(s) or protein(s), of the cysteine-rich region of wild-type DcR3, is/are preferably at least a part(s) of at least one CRD selected from CRD1, CRD2, CRD3 and CRD4. Therefore, the part(s) to be substituted with (an)other peptide(s) or protein(s), of the cysteine-rich region of wild-type DcR3, can be selected from a part(s) or a whole of CRD1, a part(s) or a whole of CRD2, a part(s) or a whole of CRD3, and a part(s) or a whole of CRD4.

[0137] The amino acid sequence of the first chimeric cysteine-rich region also includes an amino acid sequence obtained by introducing substitution of a part(s) other than the wild-type CRDs in addition to at least a part(s) of CRDs of wild-type DcR3 with (an)other peptide(s) or protein(s) into the amino acid sequence of the cysteine-rich region of wild-type DcR3. The part(s) other than CRDs to be substituted with (an)other peptide(s) or protein(s) can be selected from a region existing between CRD1 and CRD2, a region existing between CRD2 and CRD3, and a region existing between CRD3 and CRD4. The part(s) other than CRDs to be substituted with (an)other peptide(s) or protein(s) may be one part or two or more parts. For example, an amino acid sequence obtained by introducing into the region existing between CRD1 and CRD2, the region existing between CRD2 and CRD3, or the region existing between CRD3 and CRD4, substitution of the amino acid sequence with another peptide or protein is also included in the amino acid sequence of the first chimeric cysteine-rich region.

[0138] The part(s) to be substituted with (an)other peptide(s) or protein(s), of the cysteine-rich region of wild-type DcR3, may be one part or two or more parts. When at least a part(s) of CRDs of the cysteine-rich region of wild-type DcR3 is substituted, the part(s) to be substituted may be a part(s) or a whole of one CRD or a part(s) or a whole of a plurality of CRDs, but it is more preferable that a part(s) or a whole of CRD2 of wild-type DcR3, which is associated with the binding to LIGHT, TL1A and FasL, and/or a part(s) or a whole of CRD3 is/are maintained, and a part(s) or a whole of the other CRDs is substituted with (an)other peptide(s) or protein(s).

[0139] (An)other peptide(s) or protein(s) used for substitution may be a natural or artificial peptide(s) or protein(s), but examples thereof include at least a part of CRDs derived from a protein other than DcR3. In a preferred embodiment, (an)other peptide(s) or protein(s) used for substitution is/are at least a part(s) of CRDs of a TNF receptor superfamily (TNFRSF) molecule other than DcR3. In other words, in a preferred embodiment, the first chimeric cysteine-rich region consists of an amino acid sequence obtained by introducing into the amino acid sequence of the cysteine-rich region of wild-type DcR3, substitution of at least a part(s) of the cysteine-rich domain of the wild-type DcR3 with at least a part(s) of a cysteine-rich domain of a TNFRSF molecule other than DcR3. At least a part(s) of CRDs of a TNFRSF molecule can be selected from a part(s) or a whole of CRD1, a part(s) or a whole of CRD2, a part(s) or a whole of CRD3, and a part(s) or a whole of CRD4. Therefore, the first chimeric cysteine-rich region includes one or more substitution selected from:

[0140] substitution of a part of CRD1 of wild-type DcR3 with a part of CRD1 of a TNFRSF molecule, wherein the part of the CRD1 of the TNFRSF molecule corresponds to the part of the CRD1 of the wild-type DcR3;

[0141] substitution of the whole of CRD1 of wild-type DcR3 with the whole of CRD1 of a TNFRSF molecule;

[0142] substitution of a part of CRD2 of wild-type DcR3 with a part of CRD2 of a TNFRSF molecule, wherein the part of the CRD2 of the TNFRSF molecule corresponds to the part of the CRD2 of the wild-type DcR3;

[0143] substitution of the whole of CRD2 of wild-type DcR3 with the whole of CRD2 of a TNFRSF molecule;

[0144] substitution of a part of CRD3 of wild-type DcR3 with a part of CRD3 of a TNFRSF molecule, wherein the part of the CRD3 of the TNFRSF molecule corresponds to the part of the CRD3 of the wild-type DcR3;

[0145] substitution of the whole of CRD3 of wild-type DcR3 with the whole of CRD3 of a TNFRSF molecule;

[0146] substitution of a part of CRD4 of wild-type DcR3 with a part of CRD4 of a TNFRSF molecule, wherein the part of the CRD4 of the TNFRSF molecule corresponds to the part of the CRD4 of the wild-type DcR3; and

[0147] substitution of the whole of CRD4 of wild-type DcR3 with the whole of CRD4 of a TNFRSF molecule.

[0148] Examples of the first chimeric cysteine-rich region include a chimeric cysteine-rich region including substitution of CRD1 of wild-type DcR3 with CRD1 of a TNFRSF molecule (in the chimeric cysteine-rich region, preferably the other CRDs of the wild-type DcR3 are maintained), a chimeric cysteine-rich region including substitution of CRD4 of wild-type DcR3 with CRD4 of a TNFRSF molecule (in the chimeric cysteine-rich region, preferably the other CRDs of the wild-type DcR3 are maintained), or a chimeric cysteine-rich region including both of substitution of CRD1 of wild-type DcR3 with CRD1 of a TNFRSF molecule, and substitution of CRD4 of wild-type DcR3 with CRD4 of a TNFRSF molecule (in the chimeric cysteine-rich region, preferably the other CRDs of the wild-type DcR3 are maintained) or the like. Examples of the first chimeric cysteine-rich region also include a chimeric cysteine-rich region further including, in addition to one or more of the abovementioned substitutions, substitution of a part of CRD2 of wild-type DcR3 with a part of CRD2 of a TNFRSF molecule, wherein the part of the CRD2 of the TNFRSF molecule corresponds to the part of the CRD2 of the wild-type DcR3, and/or substitution of a part of CRD3 of wild-type DcR3 with a part of CRD3 of a TNFRSF molecule, wherein the part of the CRD3 of the TNFRSF molecule corresponds to the part of the CRD3 of the wild-type DcR3.

[0149] Twenty-nine (29) receptors belong to human TNFRSF, and all receptors have CRDs in the extracellular domain of the N-terminus, and it is typical that six Cys residues form three disulfide bonds per CRD, and each receptor has one to four CRDs [Trends Biochem Sci, 2002. 27: p-19-26.].

[0150] Examples of the human TNFRSF include DcR1 (TNFRSF10C, TRAIL-R3, LIT, TRID, CD263), DcR2 (INFRSF10D, TRAIL-R4, TRUNDD, CD264), TNFR type I (TNFRSF1A, TNF-R, CD120a, TNFAR, TNF-R55, TNFR60), TNFR type II (TNFRSF1B, TNFBR, CD120b, TNFR80, p75, TNF-R75), LTBR (lymphotoxin beta receptor, TNFRSF3, TNFR III, TNFCR, TNFR-RP, TNFR2-RP), OX-40 (TNFRSF4, ACT35, TXGP1L, CD134), CD40 (TNFRSF5, Bp50, p50), Fas (Fas cell surface death receptor, TNFRSF6, CD95, APO-1, APT1, FAS1), CD27 (TNFRSF7, S152, Tp55), CD30 (TNFRSF8, Ki-1), 4-1BB (TNFRSF9, CD137, ILA), DR4 (TNFRSF10A, Apo2, TRAILR-1, CD261), DR5 (TNFRSF10B, TRAIL-R2, KILLER, TRICK2A, TRICKB, CD262), RANK (TNFRSF11A, CD265, FEO), FN14 (TNFRSF12A, TweakR, CD266), TACI (TNFRSF13B, CD267, IGAD2), BAFFR (TNFRSF13C, CD268), HVEM (TNFRSF14, ATAR, TR2, LIGHTR, HVEA, CD270), NGFR (nerve growth factor receptor, TNFRSF16, p75NTR, CD271), BCMA (TNFRSF17, BCM, CD269, TNFRSF13A), GITR (TNFRSF18, AITR, CD357), TROY (TNFRSF19, TAJ-alpha, TAJ, TRADE), RELT (TNFRSF19L), DR6 (death receptor 6, TNFRSF21, CD358), DR3 (death receptor 3, TNFRSF25, TRAMP, WSL-1, LARD, WSL-LR, DDR3, TR3, APO-3), EDAR (ectodysplasin A receptor, ED3, DL, EDS, EDA3, Edar, ED1R, EDA1R), EDAR2R (ectodysplasin A2 receptor, XEDAR, EDAA2R, EDA-A2R, TNFRSF27) or osteoprotegerin (OPG, TNFRSF11B, TR1, OCIF) or the like.

[0151] In the first chimeric cysteine-rich region, (an)other peptide(s) or protein(s) used for substitution of at least a part(s) of wild-type DcR3 is/are not limited, but, of TNFRSF, OPG is particularly preferable.

[0152] The origin of OPG is not limited, and examples of OPG include OPG derived from various eukaryotes. Examples thereof include OPG derived from amphibians such as frogs, birds such as chickens, or mammals, for example, primates including humans, artiodactyls such as pigs and cattle, or rodents including mice, or the like.

[0153] The cDNA sequence of OPG derived from a human is represented by SEQ ID NO: 13, and the corresponding mRNA sequence has been registered as Accession Number: NM_002546.3 in GenBank (US NCBI). The amino acid sequence of OPG derived from a human is represented by SEQ ID NO: 14, and has been registered as Accession Number: NP_002537.3 in GenBank (US NCBI).

[0154] Premature human OPG (SEQ ID NO: 14) has a signal peptide at the N-terminus. Mature human OPG is obtained by cleaving a signal peptide from premature one. The amino acid sequence of the mature human OPG is represented by, for example, SEQ ID NO: 16, and the nucleotide sequence of a DNA encoding the amino acid sequence of the mature human OPG is represented by, for example, SEQ ID NO: 15. In the present invention, of the amino acid sequence (SEQ ID NO: 14) of premature human OPG, a region at positions 22 to 62 from the N-terminus is defined as CRD1 (SEQ ID NO: 18), a region at positions 65 to 105 is defined as CRD2 (SEQ ID NO: 20), a region at positions 107 to 142 is defined as CRD3 (SEQ ID NO: 22), and a region at positions 145 to 185 is defined as CRD4 (SEQ ID NO: 24). The nucleotide sequences of DNAs encoding the amino acid sequences of CRD1, CRD2, CRD3 and CRD4 of human OPG are represented by, for example, SEQ ID NOs: 17, 19, 21 and 23, respectively. With respect to an amino acid sequence of CRD, although there are a plurality of definitions other than those mentioned above, any definition of an amino acid sequence of CRD can be used for the DcR3 variant of the present invention by using known information [UniProt 000300, GenBank NP_002537.3].

[0155] In a gene encoding a protein of a eukaryote, polymorphisms or isoforms of the gene are often observed. With respect to a gene used in the present invention, a gene including a mutation introduced into a nucleotide sequence or amino acid sequence by such polymorphisms is also included in a gene encoding OPG used in the present invention.

[0156] OPG binds to RANKL, and neutralizes the activity thereof, thus suppressing bone destruction by osteoclasts [3. Immunol., 2012, 189: p.245-252]. OPG also binds to TRAIL, and neutralizes the activity thereof, thus inhibiting apoptosis mediated by TRAIL [Am. 3. Cancer. Res., 2012, 2: p.45-64]. Since neutralization of any ligand may cause undesired activity or the like, it is desirable that the DcR3 variant of the present invention has no neutralizing activity to any of RANKL and TRAIL.

[0157] In a preferred embodiment, the first chimeric cysteine-rich region includes or consists of the following amino acid sequence (a), (b), (c) or (d):

(a) an amino acid sequence obtained by introducing into the amino acid sequence of the cysteine-rich region of wild-type DcR3, substitution of CRD1 of the wild-type DcR3 with CRD1 of OPG (in the amino acid sequence, preferably the other CRDs of the wild-type DcR3 are maintained),
(b) an amino acid sequence obtained by introducing into the amino acid sequence of the cysteine-rich region of wild-type DcR3, substitution of CRD4 of the wild-type DcR3 with CRD4 of OPG (in the amino acid sequence, preferably the other CRDs of the wild-type DcR3 are maintained),
(c) an amino acid sequence obtained by introducing into the amino acid sequence of the cysteine-rich region of wild-type DcR3, substitution of CRD1 of the wild-type DcR3 with CRD1 of OPG and substitution of CRD4 of the wild-type DcR3 with CRD4 of OPG (in the amino acid sequence, preferably the other CRDs of the wild-type DcR3 are maintained), and
(d) an amino acid sequence obtained by introducing into the amino acid sequence (a), (b) or (c), substitution of a part of CRD2 of the wild-type DcR3 with a corresponding part of CRD2 of OPG and/or substitution of a part of CRD3 of the wild-type DcR3 with a corresponding part of CRD3 of OPG (in the amino acid sequence, preferably the other CRDs of the wild-type DcR3 are maintained).

[0158] Examples of the amino acid sequence (d) include an amino acid sequence obtained by introducing into the amino acid sequence (a), (b) or (c), substitution of a part at positions 103 to 123 from the N-terminus with a corresponding part of an amino acid sequence of CRD of OPG. This amino acid sequence includes substitution of an amino acid sequence including a part at positions 18 to 36 of CRD3 of wild-type DcR3 and two amino acid residues at the C-terminal side thereof with a part of OPG, wherein the part of OPG corresponds to the amino acid sequence to be substituted.

[0159] Specific examples of the amino acid sequence (a) include an amino acid sequence consisting of amino acids at positions 1 to 164 from the N-terminus of the amino acid sequence set forth in SEQ ID NO: 26 or 50; specific examples of the amino acid sequence (b) include an amino acid sequence consisting of amino acids at positions 1 to 164 from the N-terminus of the amino acid sequence set forth in SEQ ID NO: 28 or 52; specific examples of the amino acid sequence (c) include an amino acid sequence consisting of amino acids at positions 1 to 164 from the N-terminus of the amino acid sequence set forth in SEQ ID NO: 30 or 54; and specific examples of the amino acid sequence (d) include an amino acid sequence consisting of amino acids at positions 1 to 164 from the N-terminus of the amino acid sequence set forth in SEQ ID NO: 32 or 56.

[0160] SEQ ID NO: 26 represents an amino acid sequence of chimera B-HBD (a DcR3 variant obtained by introducing into wild-type DcR3 (SEQ ID NO: 4), substitution of CRD1 with CRD1 of OPG); SEQ ID NO: 28 represents an amino acid sequence of chimera C-HBD (a DcR3 variant obtained by introducing into wild-type DcR3 (SEQ ID NO: 4), substitution of CRD4 with CRD4 of OPG); SEQ ID NO: 30 represents an amino acid sequence of chimera A-HBD (a DcR3 variant obtained by introducing into wild-type DcR3 (SEQ ID NO: 4), substitution of CDR1 and CDR4 with CDR1 and CDR4 of OPG, respectively); SEQ ID NO: 32 represents an amino acid sequence of 103-1230PG-HBD (a DcR3 variant obtained by introducing into chimera A-HBD, substitution of an amino acid sequence including a part at positions 18 to 36 of CRD3 and two amino acids at the C-terminal side thereof with human OPG); SEQ ID NO: 50 represents an amino acid sequence of chimera B (a DcR3 variant obtained by introducing into wild-type DcR3 (SEQ ID NO: 4), substitution of CRD1 with CRD1 of OPG and deletion of a heparan sulfate-binding domain); SEQ ID NO: 52 represents an amino acid sequence of chimera C (a DcR3 variant obtained by introducing into wild-type DcR3 (SEQ ID NO: 4), substitution of CRD4 with CRD4 of OPG and deletion of a heparan sulfate-binding domain); SEQ ID NO: 54 represents an amino acid sequence of chimera A (a DcR3 variant obtained by introducing into wild-type DcR3 (SEQ ID NO: 4), substitution of CDR1 and CDR4 with CDR1 and CDR4 of OPG, respectively, and deletion of a heparan sulfate-binding domain); and SEQ ID NO: 56 represents an amino acid sequence of 103-1230PG (a DcR3 variant obtained by introducing into chimera A, substitution of an amino acid sequence including a part at positions 18 to 36 of CRD3 and two amino acids at the C-terminal side thereof with human OPG).

[0161] In a preferred embodiment, examples of the DcR3 variant including the first chimeric cysteine-rich region include a DcR3 variant having binding activity to at least one or more of LIGHT, TL1A and FasL, a DcR3 variant having binding activity to all of LIGHT, TL1A and FasL, a DcR3 variant having no binding activity to FasL and having binding activity to one of LIGHT and TL1A, or a DcR3 variant having no binding activity to FasL and having binding activity to both of LIGHT and TL1A.

[0162] In the present invention, “having binding activity to a ligand” is used as a meaning including the case where the binding activity of the DcR3 variant including the first chimeric cysteine-rich region to the ligand is comparable and is not significantly lowered compared to the binding activity of wild-type DcR3 to the ligand, and the case where the binding activity of the DcR3 variant to the ligand is significantly enhanced compared to the binding activity of wild-type DcR3 to the ligand. For example, in the case of measurement by the surface plasmon resonance method (SPR method), when the dissociation constant (K_{D}) value of a DcR3 variant is less than 3-fold compared to that of wild-type DcR3, it can be judged that the DcR3 variant has binding activity to the ligand.

[0163] In the present invention, the expression of the DcR3 variant “having no binding activity to a ligand” is used as a meaning including the case where the binding activity of the DcR3 variant including the first chimeric cysteine-rich region to the ligand is not detected, and the case where the binding activity of the DcR3 variant to the ligand is significantly lowered compared to the binding activity of wild-type DcR3 to the ligand. For example, in the case of measurement by the SPR method, when the KD value of a DcR3 variant is more than 3-fold compared to that of wild-type DcR3, or the Rmax of a DcR3 variant is less than 5, it is judged that the binding activity to the ligand is significantly lowered, and it can be defined that the DcR3 variant has no binding activity to the ligand.

[0164] In a particularly preferred embodiment, examples of the DcR3 variant including the first chimeric cysteine-rich region include a DcR3 variant with lowered FasL binding activity. “Variant with lowered FasL binding activity” means a DcR variant including a chimeric cysteine-rich region, having no binding activity to FasL and having binding activity to one or more of LIGHT and TL1A, or a DcR3 variant including a chimeric cysteine-rich region, having no binding activity to FasL and having binding activity to both of LIGHT and TL1A.

[0165] In a preferred embodiment, the DcR3 variant of the present invention is a DcR3 variant having neutralizing activity to at least one or more of LIGHT, TL1A and FasL, a DcR3 variant having neutralizing activity to all of LIGHT, TL1A and FasL, a DcR3 variant having no neutralizing activity to FasL and having neutralizing activity to one of LIGHT and TL1A, or a DcR3 variant having no neutralizing activity to FasL and having neutralizing activity to both of LIGHT and TL1A.

[0166] In the present invention, the expression of “neutralizing activity to a ligand” includes the case where the binding of the ligand to the DcR3 variant inhibits the binding of the ligand to a receptor on the cell membrane surface, and the case where inhibition of the binding of the ligand to a receptor on the cell membrane surface inhibits a cell function initiated by the binding of the ligand to the receptor on the cell membrane surface, namely, biological activity of the ligand (e.g., biological activity such as cytokine production, proliferation enhancement and apoptosis induction to a cell).

[0167] In the present invention, the expression of the DcR3 variant “having neutralizing activity” is used as a meaning including the case where the neutralizing activity of the DcR3 variant to the ligand has no significant difference compared to the neutralizing activity of wild-type DcR3 to the ligand, and the case where the neutralizing activity of the DcR3 variant to the ligand is significantly enhanced compared to the neutralizing activity of wild-type DcR3 to the ligand.

[0168] In the present invention, the expression of the DcR3 variant “having no neutralizing activity” is used as a meaning including the case where the neutralizing activity of the DcR3 variant to the ligand is significantly lowered compared to the neutralizing activity of wild-type DcR3 to the ligand.

[0169] In a particularly preferred embodiment, the DcR3 variant in the present invention is a DcR3 variant in which the binding activity to FasL is lowered. “Variant with lowered FasL binding activity” means a DcR3 variant having no neutralizing activity to FasL and having neutralizing activity to one or more of LIGHT and TL1A, or a DcR3 variant having no neutralizing activity to FasL and having neutralizing activity to both of LIGHT and TL1A.

### 2-1-2. Second Chimeric Cysteine-Rich Region

[0170] The second chimeric cysteine-rich region is a region obtained by introducing into the amino acid sequence of the first chimeric cysteine-rich region, deletion, substitution, insertion or addition of 1 to 30 amino acids.

[0171] Examples of a method for obtaining a polypeptide including an amino acid sequence obtained by introducing into the amino acid sequence of the first chimeric cysteine-rich region, deletion, substitution, insertion or addition of one or more amino acids include a site-specific mutation introduce method [Molecular Cloning, A Laboratory Manual, Second Edition, Cold Spring Harbor Laboratory Press (1989), Current Protocols in Molecular Biology, John Wiley & Sons (1987-1997), Nucleic Acids Research, 10, 6487 (1982), Proc. Natl. Acad. Sci. USA., 79, 6409, (1982), Gene, 34, 315 (1985), Proc. Natl. Acad. Sci. USA., 82, 488 (1985)].

[0172] A mutation (modification) to be added to the first chimeric cysteine-rich region may be a natural mutation or an artificial substitution, deletion, insertion or addition of an amino acid. Examples of the amino acid sequence of the second chimeric cysteine-rich region include an amino acid sequence obtained by introducing into the amino acid sequence of the first chimeric cysteine-rich region, substitution, deletion, insertion or addition of 1 or 2 or more, preferably 1 to 30, more preferably 1 to 10, still more preferably 1 to 5, and yet more preferably 1 to 3 amino acids, or an amino acid sequence having 80% or more, preferably 85% or more, more preferably 90% or more, for example, 93% or more, 95% or more, 97% or more, 98% or more or 99% or more identity to the amino acid sequence of the first chimeric cysteine-rich region. With respect to a method for describing an amino acid substitute, for example, when an amino acid substitution is obtained by introducing substitution of Asn with Ser at position 131 from the N-terminus into an amino acid sequence, the substitute can be expressed as N131S.

[0173] In a preferred embodiment, the second chimeric cysteine-rich region includes or consists of the following amino acid sequence (e):

(e) an amino acid sequence obtained by introducing into the amino acid sequence (a), (b), (c) or (d), deletion, substitution, insertion or addition of 1 to 30 amino acids.

[0174] Examples of a mutation (modification) to be added to the first chimeric cysteine-rich region include addition or deletion of a glycosylation site. By adding or deleting a glycosylation site to the first chimeric cysteine-rich region, it is possible to control the biological activity of the DcR3 variant of the present invention or properties thereof, in vivo kinetics such as half-life in blood, or physical or chemical properties such as stability of a protein.

[0175] Glycosylation generally means that a glycan is N-glycoside-linked to an asparagine residue of a peptide or a protein, and/or that a glycan is O-glycoside-linked to a serine or threonine residue. Examples of the O-linked glycan added to a DcR3 variant include core 1, core 2 or the like, or examples of the N-linked glycan include high-mannose-type, hybrid-type or complex glycan, but a complex glycan is preferable.

[0176] Examples of a mutation (modification) to be added to the first chimeric cysteine-rich region include, for example, substitution of at least one or more amino acids of the amino acid sequence of the first chimeric cysteine-rich region with an amino acid(s) to which a glycan(s) can be added via an N-glycoside linkage or O-glycoside linkage, and followed by addition of a glycan(s). Particularly, addition of an N-glycoside-linked glycan is preferable.

[0177] The present invention also includes, for example, substitution of at least one or more, preferably two or more amino acids associated with an N-glycoside linkage, of the amino acid sequence of the chimeric cysteine-rich region, with (an)other amino acid(s), followed by removal of a glycan(s). Generally, when a peptide or a protein is expressed using a yeast, an insect cell or a mammalian cell, an N-glycoside linkage of a glycan occurs by recognizing the sequence of Asn-X-Thr/Ser (wherein X represents any amino acid residue other than Pro). For example, by substituting Asn, Ser or Thr of the Asn-X-Thr/Ser sequence existing in the DcR3 variant with another amino acid, it is possible to remove an N-glycoside-linked glycan.

[0178] As the second chimeric cysteine-rich region, in order to decrease aggregates of the DcR3 variant of the present invention, particularly preferred is a chimeric cysteine-rich region having an N-glycoside-linked glycan to Asn at position 157 from the N-terminus of the amino acid sequence of the first chimeric cysteine-rich region (e.g., an amino acid sequence consisting of amino acids at positions 1 to 164 from the N-terminus of SEQ ID NO: 30).

[0179] In a preferred embodiment, the amino acid sequence of the second chimeric cysteine-rich region lacking a glycosylation site (one embodiment of the amino acid sequence (e)) includes substitution selected from:

(f) substitution of Asn at positions 131 and 144 from the N-terminus of the amino acid sequence (b), (c) or (d) (e.g., an amino acid sequence consisting of amino acids at positions 1 to 164 from the N-terminus of the amino acid sequence set forth in SEQ ID NO: 28, 30, 32, 52, 54 or 56) with other amino acids;
(g) substitution of Asn at positions 131, 144 and 157 from the N-terminus of the amino acid sequence (b), (c) or (d) (e.g., an amino acid sequence consisting of amino acids at positions 1 to 164 from the N-terminus of the amino acid sequence set forth in SEQ ID NO: 28, 30, 32, 52, 54 or 56) with other amino acids;
(h) substitution of Thr at position 133 and Ser at position 146 from the N-terminus of the amino acid sequence (b), (c) or (d) (e.g., an amino acid sequence consisting of amino acids at positions 1 to 164 from the N-terminus of the amino acid sequence set forth in SEQ ID NO: 28, 30, 32, 52, 54 or 56) with other amino acids; and
(i) substitution of Thr at position 133, Ser at position 146 and Thr at position 159 from the N-terminus of the amino acid sequence (b), (c) or (d) (e.g., an amino acid sequence consisting of amino acids at positions 1 to 164 from the N-terminus of the amino acid sequence set forth in SEQ ID NO: 28, 30, 32, 52, 54 or 56) with other amino acids.

[0180] In a further preferred embodiment, the amino acid sequence lacking a glycosylation site (one embodiment of the amino acid sequence (e)) includes substitution selected from:

(f′) substitution of Asn at positions 131 and 144 from the N-terminus of the amino acid sequence (b), (c) or (d) (e.g., an amino acid sequence consisting of amino acids at positions 1 to 164 from the N-terminus of the amino acid sequence set forth in SEQ ID NO: 28, 30, 32, 52, 54 or 56) with Ser;
(g′) substitution of Asn at positions 131, 144 and 157 from the N-terminus of the amino acid sequence (b), (c) or (d) (e.g., an amino acid sequence consisting of amino acids at positions 1 to 164 from the N-terminus of the amino acid sequence set forth in SEQ ID NO: 28, 30, 32, 52, 54 or 56) with Ser;
(h′) substitution of Thr at position 133 and Ser at position 146 from the N-terminus of the amino acid sequence (b), (c) or (d) (e.g., an amino acid sequence consisting of amino acids at positions 1 to 164 from the N-terminus of the amino acid sequence set forth in SEQ ID NO: 28, 30, 32, 52, 54 or 56) with Ala; and
(i′) substitution of Thr at position 133, Ser at position 146 and Thr at position 159 from the N-terminus of the amino acid sequence (b), (c) or (d) (e.g., an amino acid sequence consisting of amino acids at positions 1 to 164 from the N-terminus of the amino acid sequence set forth in SEQ ID NO: 28, 30, 32, 52, 54 or 56) with Ala.

[0181] Examples of an amino acid sequence including the substitution (f′) include an amino acid sequence obtained by introducing into the amino acid sequence consisting of amino acids at positions 1 to 164 from the N-terminus of the amino acid sequence set forth in SEQ ID NO: 30 or SEQ ID NO: 54, substitution of Asn at positions 131 and 144 from the N-terminus with Ser (N131S/N144S) (an amino acid sequence consisting of amino acids at positions 1 to 164 from the N-terminus of the amino acid sequence set forth in SEQ ID NO: 34 or SEQ ID NO: 58) and the like.

[0182] SEQ ID NO: 34 represents an amino acid sequence of N131S/N144S-HBD (a DcR3 variant obtained by introducing into chimera A-HBD, substitution of Asn at positions 131 and 144 from the N-terminus with Ser), and SEQ ID NO: 58 represents an amino acid sequence of N131S/N144S (a DcR3 variant obtained by introducing into chimera A, substitution of Asn at positions 131 and 144 from the N-terminus with Ser).

[0183] Examples of an amino acid sequence including the substitution (h′) include an amino acid sequence obtained by introducing into the amino acid sequence consisting of amino acids at positions 1 to 164 from the N-terminus of the amino acid sequence set forth in SEQ ID NO: 30 or SEQ ID NO: 54, substitution of Thr at position 133 and Ser at position 146 from the N-terminus with Ala (T133A/S146A) (an amino acid sequence consisting of amino acids at positions 1 to 164 from the N-terminus of the amino acid sequence set forth in SEQ ID NO: 36 or SEQ ID NO: 60) and the like.

[0184] SEQ ID NO: 36 represents an amino acid sequence of T133A/S146A-HBD (a DcR3 variant obtained by introducing into chimera A-HBD, substitution of Thr at position 133 and Ser at position 146 from the N-terminus with Ala), and SEQ ID NO: 60 represents an amino acid sequence of T133A/S146A (a DcR3 variant obtained by introducing into chimera A, substitution of Thr at position 133 and Ser at position 146 from the N-terminus with Ala).

[0185] Examples of an amino acid sequence including the substitution (g′) include an amino acid sequence obtained by introducing into the amino acid sequence consisting of amino acids at positions 1 to 164 from the N-terminus of the amino acid sequence set forth in SEQ ID NO: 30 or SEQ ID NO: 54, substitution of Asn at positions 131, 144 and 157 from the N-terminus with Ser (N131S/N144S/N157S) (an amino acid sequence consisting of amino acids at positions 1 to 164 from the N-terminus of the amino acid sequence set forth in SEQ ID NO: 38 or SEQ ID NO: 62) and the like.

[0186] SEQ ID NO: 38 represents an amino acid sequence of N131S/N144S/N157S-HBD (a DcR3 variant obtained by introducing into chimera A-HBD, substitution of Asn at positions 131, 144 and 157 from the N-terminus with Ser), and SEQ ID NO: 62 represents an amino acid sequence of N131S/N144S/N157S (a DcR3 variant obtained by introducing into chimera A, substitution of Asn at positions 131, 144 and 157 from the N-terminus with Ser).

[0187] Examples of an amino acid sequence including the substitution (i′) include an amino acid sequence obtained by introducing into the amino acid sequence consisting of amino acids at positions 1 to 164 from the N-terminus of the amino acid sequence set forth in SEQ ID NO: 30 or SEQ ID NO: 54, substitution of Thr at position 133, Ser at position 146 and Thr at position 159 from the N-terminus with Ala (T133A/S146A/T159A) (an amino acid sequence consisting of amino acids at positions 1 to 164 from the N-terminus of the amino acid sequence set forth in SEQ ID NO: 40 or SEQ ID NO: 64) and the like.

[0188] SEQ ID NO: 40 represents an amino acid sequence of T133A/S146A/T159A-HBD (a DcR3 variant obtained by introducing into chimera A-HBD, substitution of Thr at position 133, Ser at position 146 and Thr at position 159 from the N-terminus with Ala), and SEQ ID NO: 64 represents an amino acid sequence of T133A/S146A/T159A (a DcR3 variant obtained by introducing into chimera A, substitution of Thr at position 133, Ser at position 146 and Thr at position 159 from the N-terminus with Ala).

[0189] With respect to a mutation (modification) to be added to the first chimeric cysteine-rich region, for example, by not introducing a mutation into CRD2 and CRD3 of the first chimeric cysteine-rich region, which are associated with the binding to LIGHT, TL1A and FasL, and introducing a mutation into CRD1 and/or CRD4 of the first chimeric cysteine-rich region, it is possible to obtain a DcR3 variant including a chimeric cysteine-rich region in which the binding activities of LIGHT, TL1A and FasL to the chimeric cysteine-rich region are not lowered. Meanwhile, by introducing a mutation into CRD2 or/and CRD3 of the first chimeric cysteine-rich region, which are associated with the binding to LIGHT, TL1A or FasL, it is possible to obtain a DcR3 variant including a chimeric cysteine-rich region in which the binding activity of LIGHT, TL1A or FasL to the chimeric cysteine-rich region is changed. In other words, by introducing the abovementioned mutation, it is possible to obtain a DcR3 variant including a chimeric cysteine-rich region and having a desirable binding property to LIGHT, TL1A or FasL.

[0190] In a preferred embodiment, examples of the DcR3 variant including the second chimeric cysteine-rich region include a DcR3 variant including a chimeric cysteine-rich region and having binding activity to at least one or more of LIGHT, TL1A and FasL, a DcR3 variant including a chimeric cysteine-rich region and having binding activity to all of LIGHT, TL1A and FasL, a DcR3 variant including a chimeric cysteine-rich region, having no binding activity to FasL and having binding activity to one of LIGHT and TL1A, or a DcR3 variant including a chimeric cysteine-rich region, having no binding activity to FasL and having binding activity to both of LIGHT and TL1A, or the like. With respect to the DcR3 variant of the present invention, the meanings of the expressions of “having binding activity to a ligand” and “having no binding activity to a ligand” are as mentioned above.

[0191] In a particularly preferred embodiment, examples of the DcR3 variant including the second chimeric cysteine-rich region include a DcR3 variant with lowered FasL binding activity. “Variant with lowered FasL binding activity” means a DcR3 variant including a chimeric cysteine-rich region, having no binding activity to FasL and having binding activity to one or more of LIGHT and TL1A, or a DcR3 variant including a chimeric cysteine-rich region, having no binding activity to FasL and having binding activity to both of LIGHT and TL1A.

[0192] In a preferred embodiment, examples of the DcR3 variant including the second chimeric cysteine-rich region include a DcR3 variant including a chimeric cysteine-rich region and having neutralizing activity to at least one or more of LIGHT, TL1A and FasL, a DcR3 variant including a chimeric cysteine-rich region and having neutralizing activity to all of LIGHT, TL1A and FasL, a DcR3 variant including a chimeric cysteine-rich region, having no neutralizing activity to FasL and having neutralizing activity to one of LIGHT and TL1A, or a DcR3 variant including a chimeric cysteine-rich region, having no neutralizing activity to FasL and having neutralizing activity to both of LIGHT and TL1A, or the like. With respect to the DcR3 variant of the present invention, the meanings of the expressions of “having neutralizing activity to a ligand” and “having no neutralizing activity to a ligand” are as mentioned above.

[0193] In a particularly preferred embodiment, examples of the DcR3 variant including the second chimeric cysteine-rich region include a DcR3 variant with lowered FasL neutralizing activity. “Variant with lowered FasL neutralizing activity” means a DcR3 variant including a chimeric cysteine-rich region, having no neutralizing activity to FasL and having neutralizing activity to one or more of LIGHT and TL1A, or a DcR3 variant including a chimeric cysteine-rich region, having no neutralizing activity to FasL and having neutralizing activity to both of LIGHT and TL1A.

[0194] For example, a DcR3 variant that is a variant with lowered FasL binding activity and includes a chimeric cysteine-rich region can be obtained by producing a modified product in which a binding site to each ligand of DcR3 or a DcR3 variant predicted by a crystal structure analysis or the like is substituted with Ala or another amino acid, and measuring the binding activity and the neutralizing activity to a LIGHT, TL1A or FasL ligand. The DcR3 variant can also be obtained by producing a gene library in which regions around the ligand-binding site of DcR3 or a DcR3 variant are randomly converted to other amino acids, displaying it on a phage, a yeast, a mammalian cell or the like, and performing screening using the binding activity and the neutralizing activity to a LIGHT, TL1A or FasL ligand as indices.

[0195] Examples of an amino acid sequence of a chimeric cysteine-rich region included in a variant with lowered FasL binding activity (one embodiment of the amino acid sequence (e)) include an amino acid sequence obtained by introducing into the amino acid sequence (a), (b), (c) or (d), substitution of one or two or more amino acids selected from the group consisting of Glu at position 57, Arg at position 58 and Arg at position 60 from the N-terminus with (an)other amino acid(s).

[0196] Another amino acid used for substitution of Glu at position 57 is not particularly limited, and can be appropriately selected from 19 types of amino acids excluding Glu, of 20 types of amino acids (Glu, Ala, Asp, Lys, Leu, Cys, Phe, Gly, His, Ile, Met, Asn, Pro, Gln, Arg, Ser, Thr, Val, Trp and Tyr), but it is preferably selected from Lys, Leu, Arg, Val, Ala, Phe, His, Ile and Met, more preferably selected from Lys, Leu, Arg and Val, still more preferably selected from Lys, Arg and Val, and yet more preferably selected from Lys and Arg.

[0197] Another amino acid used for substitution of Arg at position 58 is not particularly limited, and can be appropriately selected from 19 types of amino acids excluding Arg, of 20 types of amino acids, but it is preferably selected from Asp, Glu and Thr, and more preferably selected from Asp and Glu.

[0198] Another amino acid used for substitution of Arg at position 60 is not particularly limited, and can be appropriately selected from 19 types of amino acids excluding Arg, of 20 types of amino acids, but it is preferably Lys.

[0199] In a preferred embodiment, one amino acid consisting of Glu at position 57 is selected as the one or two or more amino acids selected from the group consisting of Glu at position 57, Arg at position 58 and Arg at position 60.

[0200] In further another preferred embodiment, two amino acids consisting of Glu at position 57 and Arg at position 58 are selected as the one or two or more amino acids selected from the group consisting of Glu at position 57, Arg at position 58 and Arg at position 60. In this embodiment, it is preferable to combine substitution of Glu at position 57 with Lys, Leu, Arg, Val, Ala, Phe, His, Ile or Met and substitution of Arg at position 58 with Asp, Glu or Thr, it is more preferable to combine substitution of Glu at position 57 with Lys, Leu, Arg or Val and substitution of Arg at position 58 with Asp or Glu, and it is still more preferable to combine substitution of Glu at position 57 with Lys or Arg and substitution of Arg at position 58 with Asp or Glu.

[0201] The second chimeric cysteine-rich region may include substitution of one or two or more amino acids other than Glu at position 57, Arg at position 58 and Arg at position 60 with (an)other amino acid(s). Examples of an amino acid other than Glu at position 57, Arg at position 58 and Arg at position 60 include Trp at position 53, Asn at position 54, Tyr at position 55, Leu at position 56 or the like from the N-terminus of the amino acid sequence (a), (b), (c) or (d).

[0202] Another amino acid used for substitution of Trp at position 53 is not particularly limited, and can be appropriately selected from 19 types of amino acids excluding Trp, of 20 types of amino acids, but it is preferably selected from Asp and Asn. Substitution of Trp at position 53 with another amino acid can be combined with, for example, substitution of Glu at position 57 with another amino acid.

[0203] Another amino acid used for substitution of Asn at position 54 is not particularly limited, and can be appropriately selected from 19 types of amino acids excluding Asn, of 20 types of amino acids, but it is preferably Asp. Substitution of Asn at position 54 with another amino acid can be combined with, for example, substitution of Glu at position 57 with another amino acid.

[0204] Another amino acid used for substitution of Tyr at position 55 is not particularly limited, and can be appropriately selected from 19 types of amino acids excluding Tyr, of 20 types of amino acids, but it is preferably selected from Thr, Asp, Gln and Glu. Substitution of Tyr at position 55 with another amino acid can be combined with, for example, substitution of Glu at position 57 with another amino acid.

[0205] Another amino acid used for substitution of Leu at position 56 is not particularly limited, and can be appropriately selected from 19 types of amino acids excluding Leu, of 20 types of amino acids, but it is preferably selected from Asp, Gln, Thr, Glu, Gly, Asn and Pro. Substitution of Leu at position 56 with another amino acid can be combined with, for example, substitution of Glu at position 57 with another amino acid.

[0206] Specific examples of an amino acid sequence including substitution of one or two or more amino acids selected from the group consisting of Glu at position 57, Arg at position 58 and Arg at position 60 from the N-terminus of the amino acid sequence (a), (b), (c) or (d) with (an)other amino acid(s) include:

[0207] an amino acid sequence obtained by introducing into the amino acid sequence consisting of amino acids at positions 1 to 164 from the N-terminus of the amino acid sequence set forth in SEQ ID NO: 30, substitution of Glu at position 57 from the N-terminus with Lys (an amino acid sequence consisting of amino acids at positions 1 to 164 from the N-terminus of the amino acid sequence set forth in SEQ ID NO: 42);

[0208] an amino acid sequence obtained by introducing into the amino acid sequence consisting of amino acids at positions 1 to 164 from the N-terminus of the amino acid sequence set forth in SEQ ID NO: 54, substitution of Glu at position 57 from the N-terminus with Lys (an amino acid sequence consisting of amino acids at positions 1 to 164 from the N-terminus of the amino acid sequence set forth in SEQ ID NO: 66);

[0209] an amino acid sequence obtained by introducing into the amino acid sequence consisting of amino acids at positions 1 to 164 from the N-terminus of the amino acid sequence set forth in SEQ ID NO: 30, substitution of Glu at position 57 from the N-terminus with Leu (an amino acid sequence consisting of amino acids at positions 1 to 164 from the N-terminus of the amino acid sequence set forth in SEQ ID NO: 44);

[0210] an amino acid sequence obtained by introducing into the amino acid sequence consisting of amino acids at positions 1 to 164 from the N-terminus of the amino acid sequence set forth in SEQ ID NO: 54, substitution of Glu at position 57 from the N-terminus with Leu (an amino acid sequence consisting of amino acids at positions 1 to 164 from the N-terminus of the amino acid sequence set forth in SEQ ID NO: 68);

[0211] an amino acid sequence obtained by introducing into the amino acid sequence consisting of amino acids at positions 1 to 164 from the N-terminus of the amino acid sequence set forth in SEQ ID NO: 30, substitution of Arg at position 60 from the N-terminus with Lys (an amino acid sequence consisting of amino acids at positions 1 to 164 from the N-terminus of the amino acid sequence set forth in SEQ ID NO: 46);

[0212] an amino acid sequence obtained by introducing into the amino acid sequence consisting of amino acids at positions 1 to 164 from the N-terminus of the amino acid sequence set forth in SEQ ID NO: 54, substitution of Arg at position 60 from the N-terminus with Lys (an amino acid sequence consisting of amino acids at positions 1 to 164 from the N-terminus of the amino acid sequence set forth in SEQ ID NO: 70);

[0213] an amino acid sequence obtained by introducing into the amino acid sequence consisting of amino acids at positions 1 to 164 from the N-terminus of the amino acid sequence set forth in SEQ ID NO: 30, substitution of Glu at position 57 from the N-terminus with Arg;

[0214] an amino acid sequence obtained by introducing into the amino acid sequence consisting of amino acids at positions 1 to 164 from the N-terminus of the amino acid sequence set forth in SEQ ID NO: 54, substitution of Glu at position 57 from the N-terminus with Arg (an amino acid sequence consisting of amino acids at positions 1 to 164 from the N-terminus of the amino acid sequence set forth in SEQ ID NO: 180);

[0215] an amino acid sequence obtained by introducing into the amino acid sequence consisting of amino acids at positions 1 to 164 from the N-terminus of the amino acid sequence set forth in SEQ ID NO: 30, substitution of Glu at position 57 from the N-terminus with Val;

[0216] an amino acid sequence obtained by introducing into the amino acid sequence consisting of amino acids at positions 1 to 164 from the N-terminus of the amino acid sequence set forth in SEQ ID NO: 54, substitution of Glu at position 57 from the N-terminus with Val (an amino acid sequence consisting of amino acids at positions 1 to 164 from the N-terminus of the amino acid sequence set forth in SEQ ID NO: 182);

[0217] an amino acid sequence obtained by introducing into the amino acid sequence consisting of amino acids at positions 1 to 164 from the N-terminus of the amino acid sequence set forth in SEQ ID NO: 30, substitution of Glu at position 57 from the N-terminus with Ala;

[0218] an amino acid sequence obtained by introducing into the amino acid sequence consisting of amino acids at positions 1 to 164 from the N-terminus of the amino acid sequence set forth in SEQ ID NO: 54, substitution of Glu at position 57 from the N-terminus with Ala (an amino acid sequence consisting of amino acids at positions 1 to 164 from the N-terminus of the amino acid sequence set forth in SEQ ID NO: 270);

[0219] an amino acid sequence obtained by introducing into the amino acid sequence consisting of amino acids at positions 1 to 164 from the N-terminus of the amino acid sequence set forth in SEQ ID NO: 30, substitution of Glu at position 57 from the N-terminus with Phe;

[0220] an amino acid sequence obtained by introducing into the amino acid sequence consisting of amino acids at positions 1 to 164 from the N-terminus of the amino acid sequence set forth in SEQ ID NO: 54, substitution of Glu at position 57 from the N-terminus with Phe (an amino acid sequence consisting of amino acids at positions 1 to 164 from the N-terminus of the amino acid sequence set forth in SEQ ID NO: 272);

[0221] an amino acid sequence obtained by introducing into the amino acid sequence consisting of amino acids at positions 1 to 164 from the N-terminus of the amino acid sequence set forth in SEQ ID NO: 30, substitution of Glu at position 57 from the N-terminus with His;

[0222] an amino acid sequence obtained by introducing into the amino acid sequence consisting of amino acids at positions 1 to 164 from the N-terminus of the amino acid sequence set forth in SEQ ID NO: 54, substitution of Glu at position 57 from the N-terminus with His (an amino acid sequence consisting of amino acids at positions 1 to 164 from the N-terminus of the amino acid sequence set forth in SEQ ID NO: 274);

[0223] an amino acid sequence obtained by introducing into the amino acid sequence consisting of amino acids at positions 1 to 164 from the N-terminus of the amino acid sequence set forth in SEQ ID NO: 30, substitution of Glu at position 57 from the N-terminus with Ile;

[0224] an amino acid sequence obtained by introducing into the amino acid sequence consisting of amino acids at positions 1 to 164 from the N-terminus of the amino acid sequence set forth in SEQ ID NO: 54, substitution of Glu at position 57 from the N-terminus with Ile (an amino acid sequence consisting of amino acids at positions 1 to 164 from the N-terminus of the amino acid sequence set forth in SEQ ID NO: 276);

[0225] an amino acid sequence obtained by introducing into the amino acid sequence consisting of amino acids at positions 1 to 164 from the N-terminus of the amino acid sequence set forth in SEQ ID NO: 30, substitution of Glu at position 57 from the N-terminus with Met;

[0226] an amino acid sequence obtained by introducing into the amino acid sequence consisting of amino acids at positions 1 to 164 from the N-terminus of the amino acid sequence set forth in SEQ ID NO: 54, substitution of Glu at position 57 from the N-terminus with Met (an amino acid sequence consisting of amino acids at positions 1 to 164 from the N-terminus of the amino acid sequence set forth in SEQ ID NO: 278);

[0227] an amino acid sequence obtained by introducing into the amino acid sequence consisting of amino acids at positions 1 to 164 from the N-terminus of the amino acid sequence set forth in SEQ ID NO: 30, substitution of Glu at position 57 from the N-terminus with Lys, and substitution of Arg at position 58 from the N-terminus with Asp;

[0228] an amino acid sequence obtained by introducing into the amino acid sequence consisting of amino acids at positions 1 to 164 from the N-terminus of the amino acid sequence set forth in SEQ ID NO: 54, substitution of Glu at position 57 from the N-terminus with Lys, and substitution of Arg at position 58 from the N-terminus with Asp (an amino acid sequence consisting of amino acids at positions 1 to 164 from the N-terminus of the amino acid sequence set forth in SEQ ID NO: 184);

[0229] an amino acid sequence obtained by introducing into the amino acid sequence consisting of amino acids at positions 1 to 164 from the N-terminus of the amino acid sequence set forth in SEQ ID NO: 30, substitution of Glu at position 57 from the N-terminus with Lys, and substitution of Arg at position 58 from the N-terminus with Glu;

[0230] an amino acid sequence obtained by introducing into the amino acid sequence consisting of amino acids at positions 1 to 164 from the N-terminus of the amino acid sequence set forth in SEQ ID NO: 54, substitution of Glu at position 57 from the N-terminus with Lys, and substitution of Arg at position 58 from the N-terminus with Glu (an amino acid sequence consisting of amino acids at positions 1 to 164 from the N-terminus of the amino acid sequence set forth in SEQ ID NO: 186);

[0231] an amino acid sequence obtained by introducing into the amino acid sequence consisting of amino acids at positions 1 to 164 from the N-terminus of the amino acid sequence set forth in SEQ ID NO: 30, substitution of Glu at position 57 from the N-terminus with Arg, and substitution of Arg at position 58 from the N-terminus with Asp;

[0232] an amino acid sequence obtained by introducing into the amino acid sequence consisting of amino acids at positions 1 to 164 from the N-terminus of the amino acid sequence set forth in SEQ ID NO: 54, substitution of Glu at position 57 from the N-terminus with Arg, and substitution of Arg at position 58 from the N-terminus with Asp (an amino acid sequence consisting of amino acids at positions 1 to 164 from the N-terminus of the amino acid sequence set forth in SEQ ID NO: 188);

[0233] an amino acid sequence obtained by introducing into the amino acid sequence consisting of amino acids at positions 1 to 164 from the N-terminus of the amino acid sequence set forth in SEQ ID NO: 30, substitution of Glu at position 57 from the N-terminus with Lys, and substitution of Arg at position 58 from the N-terminus with Thr;

[0234] an amino acid sequence obtained by introducing into the amino acid sequence consisting of amino acids at positions 1 to 164 from the N-terminus of the amino acid sequence set forth in SEQ ID NO: 54, substitution of Glu at position 57 from the N-terminus with Lys, and substitution of Arg at position 58 from the N-terminus with Thr (an amino acid sequence consisting of amino acids at positions 1 to 164 from the N-terminus of the amino acid sequence set forth in SEQ ID NO: 280);

[0235] an amino acid sequence obtained by introducing into the amino acid sequence consisting of amino acids at positions 1 to 164 from the N-terminus of the amino acid sequence set forth in SEQ ID NO: 30, substitution of Glu at position 57 from the N-terminus with Leu, and substitution of Arg at position 58 from the N-terminus with Glu;

[0236] an amino acid sequence obtained by introducing into the amino acid sequence consisting of amino acids at positions 1 to 164 from the N-terminus of the amino acid sequence set forth in SEQ ID NO: 54, substitution of Glu at position 57 from the N-terminus with Leu, and substitution of Arg at position 58 from the N-terminus with Glu (an amino acid sequence consisting of amino acids at positions 1 to 164 from the N-terminus of the amino acid sequence set forth in SEQ ID NO: 282);

[0237] an amino acid sequence obtained by introducing into the amino acid sequence consisting of amino acids at positions 1 to 164 from the N-terminus of the amino acid sequence set forth in SEQ ID NO: 30, substitution of Glu at position 57 from the N-terminus with Val, and substitution of Arg at position 58 from the N-terminus with Thr;

[0238] an amino acid sequence obtained by introducing into the amino acid sequence consisting of amino acids at positions 1 to 164 from the N-terminus of the amino acid sequence set forth in SEQ ID NO: 54, substitution of Glu at position 57 from the N-terminus with Val, and substitution of Arg at position 58 from the N-terminus with Thr (an amino acid sequence consisting of amino acids at positions 1 to 164 from the N-terminus of the amino acid sequence set forth in SEQ ID NO: 284);

[0239] an amino acid sequence obtained by introducing into the amino acid sequence consisting of amino acids at positions 1 to 164 from the N-terminus of the amino acid sequence set forth in SEQ ID NO: 30, substitution of Glu at position 57 from the N-terminus with Val, and substitution of Arg at position 58 from the N-terminus with TGIu; and

[0240] an amino acid sequence obtained by introducing into the amino acid sequence consisting of amino acids at positions 1 to 164 from the N-terminus of the amino acid sequence set forth in SEQ ID NO: 54, substitution of Glu at position 57 from the N-terminus with Val, and substitution of Arg at position 58 from the N-terminus with Glu (an amino acid sequence consisting of amino acids at positions 1 to 164 from the N-terminus of the amino acid sequence set forth in SEQ ID NO: 286).

[0241] SEQ ID NO: 42 represents an amino acid sequence of chimera A-E57K-HBD (a DcR3 variant obtained by introducing into chimera A-HBD, substitution of Glu at position 57 from the N-terminus with Lys); SEQ ID NO: 44 represents an amino acid sequence of chimera A-E57L-HBD (a DcR3 variant obtained by introducing into chimera A-HBD, substitution of Glu at position 57 from the N-terminus with Leu); SEQ ID NO: 46 represents an amino acid sequence of chimera A-R60K-HBD (a DcR3 variant obtained by introducing into chimera A-HBD, substitution of Arg at position 60 from the N-terminus with Lys); SEQ ID NO: 66 represents an amino acid sequence of chimera A-E57K (a DcR3 variant obtained by introducing into chimera A, substitution of Glu at position 57 from the N-terminus with Lys); SEQ ID NO: 68 represents an amino acid sequence of chimera A-E57L (a DcR3 variant obtained by introducing into chimera A, Glu at position 57 from the N-terminus with Leu); SEQ ID NO: 70 represents an amino acid sequence of chimera A-R6OK (a DcR3 variant obtained by introducing into chimera A, substitution of Arg at position 60 from the N-terminus with Lys); SEQ ID NO: 180 represents an amino acid sequence of chimera A-E57R (a DcR3 variant obtained by introducing into chimera A, substitution of Glu at position 57 from the N-terminus with Arg); SEQ ID NO: 182 represents an amino acid sequence of chimera A-E57V (a DcR3 variant obtained by introducing into chimera A, substitution of Glu at position 57 from the N-terminus with Val); SEQ ID NO: 184 represents an amino acid sequence of chimera A-E57K_R58D (a DcR3 variant obtained by introducing into chimera A, substitution of Glu at position 57 from the N-terminus with Lys, and substitution of Arg at position 58 from the N-terminus with Asp); SEQ ID NO: 186 represents an amino acid sequence of chimera A-E57K_R58E (a DcR3 variant obtained by introducing into chimera A, substitution of Glu at position 57 from the N-terminus with Lys, and substitution of Arg at position 58 from the N-terminus with Glu); SEQ ID NO: 188 represents an amino acid sequence of chimera A-E57R_R58D (a DcR3 variant obtained by introducing into chimera A, substitution of Glu at position 57 from the N-terminus with Arg, and substitution of Arg at position 58 from the N-terminus with Asp); SEQ ID NO: 270 represents an amino acid sequence of chimera A-E57A (a DcR3 variant obtained by introducing into chimera A, substitution of Glu at position 57 from the N-terminus with Ala); SEQ ID NO: 272 represents an amino acid sequence of chimera A-E57F (a DcR3 variant obtained by introducing into chimera A, substitution of Glu at position 57 from the N-terminus with Phe); SEQ ID NO: 274 represents an amino acid sequence of chimera A-E57H (a DcR3 variant obtained by introducing into chimera A, substitution of Glu at position 57 from the N-terminus with His); SEQ ID NO: 276 represents an amino acid sequence of chimera A-E57I (a DcR3 variant obtained by introducing into chimera A, substitution of Glu at position 57 from the N-terminus with Ile); SEQ ID NO: 278 represents an amino acid sequence of chimera A-E57M (a DcR3 variant obtained by introducing into chimera A, substitution of Glu at position 57 from the N-terminus with Met); SEQ ID NO: 280 represents an amino acid sequence of chimera A-E57K_R58T (a DcR3 variant obtained by introducing into chimera A, substitution of Glu at position 57 from the N-terminus with Lys, and substitution of Arg at position 58 from the N-terminus with Thr); SEQ ID NO: 282 represents an amino acid sequence of chimera A-E57K_R58T (a DcR3 variant obtained by introducing into chimera A, substitution of Glu at position 57 from the N-terminus with Lys, and substitution of Arg at position 58 from the N-terminus with Thr); SEQ ID NO: 284 represents an amino acid sequence of chimera A-E57V_R58T (a DcR3 variant obtained by introducing into chimera A, substitution of Glu at position 57 from the N-terminus with Val, and substitution of Arg at position 58 from the N-terminus with Thr); and SEQ ID NO: 286 represents an amino acid sequence of chimera A-E57V_R58E (a DcR3 variant obtained by introducing into chimera A, substitution of Glu at position 57 from the N-terminus with Val, and substitution of Arg at position 58 from the N-terminus with Glu).

### 2-2. Other Region

[0242] The DcR3 variant of the present invention may or may not include one or two or more other regions bound to the C-terminal side of the first or second chimeric cysteine-rich region. Examples of the other regions include a part or a whole of a region existing between CRD4 and HBD in wild-type DcR3, a part or a whole of a region following the C-terminus of the amino acid sequence of CRD4 in a TNF receptor superfamily (TNFRSF) molecule other than DcR3, a part or a whole of HBD of wild-type DcR3 and the like. The expression of “other region bound to the C-terminal side of the first or second chimeric cysteine-rich region” is used as a meaning including the case where the other region is directly bound to the C-terminus of the first or second chimeric cysteine-rich region, and the case where the other region is bound to the C-terminus of the first or second chimeric cysteine-rich region via another further region.

[0243] In one embodiment, the DcR3 variant of the present invention includes a part or a whole of a region existing between CRD4 and HBD in wild-type DcR3 as the other region bound to the C-terminal side of the first or second chimeric cysteine-rich region. In this embodiment, the other region is preferably directly bound to the C-terminus of the first or second chimeric cysteine-rich region.

[0244] In another embodiment, the DcR3 variant of the present invention includes a part or a whole of a region extending to the C-terminus of the amino acid sequence of CRD4 in a TNF receptor superfamily (TNFRSF) molecule other than DcR3 as the other region bound to the C-terminal side of the first or second chimeric cysteine-rich region. In this embodiment, the other region is preferably directly bound to the C-terminus of the first or second chimeric cysteine-rich region. The description on TNFRSF is the same as mentioned above. TNFRSF is preferably OPG.

[0245] When the first or second chimeric cysteine-rich region (e.g., the first chimeric cysteine-rich region consisting of the amino acid sequence (b), (c) or (d)) includes substitution of CRD4 of wild-type DcR3 with CRD4 of OPG, the DcR3 variant of the present invention preferably includes a plurality of amino acid residues following the C-terminus of the amino acid sequence of the CRD4 of the OPG as the other region bound to the C-terminus of the chimeric cysteine-rich region. In other words, when CR4 of wild-type DcR3 is substituted with CRD4 of OPG, a plurality of amino acid residues following the C-terminus of the amino acid sequence of the CRD4 of the wild-type DcR3 is also preferably substituted with a plurality of amino acid residues following the C-terminus of the amino acid sequence of the CRD4 of the OPG. As a plurality of amino acid residues following the C-terminus of the amino acid sequence of CRD4 of OPG, for example, amino acid residues at positions 186 to 194 of the amino acid sequence (SEQ ID NO: 14) of OPG are preferable, but it is possible to appropriately adjust the number of amino acid residues used for substitution of a plurality of amino acid residues following the C-terminus of CRD4 of wild-type DcR3. The number of a plurality of amino acid residues extending to the C-terminus of the amino acid sequence of CRD4 of OPG is usually 1 to 12, preferably 1 to 10, more preferably 1 to 9, 1 to 6, or 1 to 3. When the first or second chimeric cysteine-rich region (e.g., the first chimeric cysteine-rich region consisting of the amino acid sequence (a) or (d)) includes CRD4 derived from wild-type DcR3, it is preferable that an amino acid sequence following the C-terminus of the amino acid sequence of the CRD4 of the wild-type DcR3 is bound to the C-terminus of the amino acid sequence of the CRD4 of the first chimeric cysteine-rich region. Examples of such amino acid sequence include amino acids at positions 194 to 195 of SEQ ID NO: 2, but it is possible to appropriately adjust the number of amino acid residues constituting the amino acid sequence following the C-terminus of the amino acid sequence of CRD4 of wild-type DcR3. The number of amino acid residues constituting the amino acid sequence extending to the C-terminus of CRD4 of wild-type DcR3 is usually 1 to 10, preferably 1 to 5, more preferably 1 to 3, and still more preferably 1 to 2.

[0246] In further another embodiment, the DcR3 variant of the present invention includes a part or a whole of HBD of wild-type DcR3 as the other region bound to the C-terminal side of the first or second chimeric cysteine-rich region. In this embodiment, the other region may be directly bound to the C-terminus of the first or second chimeric cysteine-rich region, or may be bound to the C-terminus of the first or second chimeric cysteine-rich region via a part or a whole of a region existing between CRD4 and HBD in wild-type DcR3 or via a part or a whole of a region extending to the C-terminus of the amino acid sequence of CRD4 in a TNFRSF molecule other than DcR3.

[0247] It is preferable that the DcR3 variant of the present invention does not include HBD and includes amino acid residues at positions 186 to 194 of the amino acid sequence (SEQ ID NO: 14) of OPG as the other regions bound to the C-terminal side of the first or second chimeric cysteine-rich region.

### 3. DcR3 Variant Including Glycan

[0248] The DcR3 variant of the present invention also includes a DcR3 variant including at least one glycan. If at least one glycan is bound to the cysteine-rich region included in the DcR3 variant mentioned above or an amino acid residue other than it, any DcR3 variant including a glycan is also included in the present invention.

[0249] Glycoprotein has one or two or more glycans. When glycoprotein has two or more glycans, one type of glycan may be included or two or more types of glycans may be included in the glycoprotein. Examples of the glycan included in the glycoprotein include a glycan that is N-glycoside-linked to an amino acid residue (e.g., an asparagine residue, etc.) of a peptide or a protein, a glycan that is O-glycoside-linked to an amino acid residue (e.g., a serine residue, a threonine residue, etc.) of a peptide or a protein, or the like. Examples of the 0-linked glycan include core 1, core 2 or the like, or examples of the N-linked glycan include high-mannose-type, hybrid-type or complex glycan, but a complex glycan is preferable.

### 4. DcR3 Variant Including Fc Region

[0250] The DcR3 variant of the present invention also includes a protein in which a homogeneous or heterogeneous peptide, polypeptide or protein is bound or fused directly or, if necessary, via an appropriate peptide linker to the N-terminal side or the C-terminal side of the chimeric cysteine-rich region (or a chimeric cysteine-rich region including (an)other region(s)). The number of amino acids constituting the peptide linker is not particularly limited, but examples thereof include 4, 5, 6 or 15 or the like.

[0251] Examples of the polypeptide or protein to be bound or fused to the chimeric cysteine-rich region include a polypeptide or protein such as a constant region or Fc region of an immunoglobulin, a peptide that binds to a neonatal Fc receptor (FcRn), albumin, Protein A, Protein G, β-galactosidase, glutathione-S-transferase (GST), a maltose-binding protein, polyhistidine and an FLAG peptide, but it is preferably an Fc region of an immunoglobulin or a mutant thereof (mutated Fc region), and more preferably an Fc region of an immunoglobulin derived from a mammal or a mutant thereof (mutated Fc region).

[0252] As an Fc region of an immunoglobulin (also referred to as antibody), an Fc region of a human immunoglobulin is preferable when used for a human. Examples of a class and a subclass of the immunoglobulin include, but are not limited to, IgG, IgD, IgE, IgM, IgA, IgG1, IgG2, IgG2a, IgG2b, IgG2c, IgG3, IgG4 or IgA1 or the like, and, if used for a human, it is preferable to use a class and a subclass of a human immunoglobulin. When an Fc region of an immunoglobulin is used as a polypeptide or protein to be bound or fused to the chimeric cysteine-rich region, preferably the Fc region of the immunoglobulin is bound or fused to the C-terminal side of the chimeric cysteine-rich region.

[0253] The immunoglobulin is composed of polypeptides of a heavy chain and a light chain, and the constant region of a heavy chain of human IgG is composed of a CH1 domain, a hinge domain, a CH2 domain and a CH3 domain in this order from the N-terminus. The Fc region of IgG in the present invention also includes a region combining the CH2 domain and the CH3 domain, and a region combining a part or a whole of the hinge domain, the CH2 domain and the CH3 domain. Each domain included in the Fc region of IgG in the present invention can be identified by the number of the EU index. Specifically, the hinge domain is identified by EU-index positions 216 to 230, the CH2 domain is identified by EU-index positions 231 to 340, and CH3 is identified by EU-index positions 341 to 447.

[0254] The polypeptide or protein to be bound or fused to the chimeric cysteine-rich region also includes a modified polypeptide or protein further including substitution, deletion, insertion or addition of one or more amino acids in order to change the biological activity of the DcR3 variant or properties thereof, in vivo kinetics such as half-life in blood, or physical or chemical properties such as stability of a protein. The modification of the polypeptide or protein to be bound or fused to the chimeric cysteine-rich region may be a natural mutation or an artificial substitution, deletion, insertion or addition of an amino acid. Examples of the modified polypeptide or protein include a mutated Fc region consisting of an amino acid sequence obtained by introducing into the amino acid sequence of the Fc region of the immunoglobulin, substitution, deletion, insertion or addition of one or several amino acids. Examples of the amino acid sequence of the mutated Fc region include an amino acid sequence obtained by introducing into the amino acid sequence of the Fc region of the immunoglobulin, substitution, deletion, insertion or addition of one or several, preferably 2 to 30, more preferably 2 to 10, and particularly preferably 2 to 5 amino acids, or an amino acid sequence having 80% or more, preferably 85% or more, and more preferably 90% or more identity to the amino acid sequence of the Fc region of the immunoglobulin.

[0255] An addition or deletion of the abovementioned glycosylation site is also included in the modification of a polypeptide or protein to be bound or fused to the chimeric cysteine-rich region. For example, by adding or inserting a polypeptide including an N-linked glycosylation site, it is possible to add the glycosylation site. Specific examples of the sequence of the polypeptide include GGNGT or YGNGT consisting of five amino acids [WO 2014/153111 A].

[0256] Examples of substitution introduced into human IgG1 in order to lower or eliminate complement-dependent cytotoxicity (CDC) activity include substitution of one or two or more amino acids selected from Leu at EU-index position 234 (L234), Leu at EU-index position 235 (L235), Asp at EU-index position 265 (D265), Asp at EU-index position 270 (D265), Lys at EU-index position 322 (K322), Pro at EU-index position 329 (P329), Pro at EU-index position 331 (P331) and the like with (an)other amino acid(s) or the like, and specific examples thereof include substitution of one or two or more amino acids selected from L234, L235, D270, K322, P329, P331 and the like indicated by the EU index with Ala, or substitution of P331 with Ser or Gly [J. Immunol., 2000, 164: p.4178-4184, Cell. Immunol., 2000, 200: p.16-26].

[0257] Examples of substitution introduced into human IgG1 in order to lower or eliminate effector activity such as antibody-dependent cellular cytotoxicity (ADCC) activity and antibody-dependent cellular phagocytosis (ADCP) include substitution of one or two or more amino acids selected from Asn at EU-index position 297 (N297), Leu at EU-index position 234 (L234), Leu at EU-index position 235 (L235), Gly at EU-index position 237 (G237), Cys at EU-index position 226 (C226), Cys at EU-index position 229 (C229), Pro at EU-index position 238 (P238), Glu at EU-index position 233 (E233), Ser at EU-index position 267 (S267), Leu at EU-index position 328 (L328), Pro at EU-index position 331 (P331) and the like with (an)other amino acid(s), and specific examples thereof include an amino acid substitution such as substitution of N297 indicated by the EU index with Ala (N297A), substitution of N297 indicated by the EU index with Gln (N297Q), substitution of N297 indicated by the EU index with Gly (N297G), or substitution of L234 indicated by the EU index with Ala (L234A)/substitution of L235 indicated by the EU index with Ala (L235A)/substitution of G237 indicated by the EU index with Ala (G237A) or the like. “/” means “and” (the same hereinafter).

[0258] In addition, examples of modification that increases the binding activity to FcγRIIb, which is an inhibitory receptor, include substitution of Gly at EU-index position 236 with Asp (G236D), substitution of Leu at EU-index position 328 with Phe (L328F), substitution of Ser at EU-index position 239 with Asp (S239D), substitution of Ser at EU-index position 267 with Glu (S267E) or the like [Curr. Opin. Cell. Biol., 2009, 20: p.685-691]. Examples of modification that enhances the binding to a neonatal Fc receptor (FcRn) in an environment with low pH in an endosome, thus avoiding the elimination of an antibody and prolonging the half-life in blood include substitution of Thr at EU-index position 250 with Gln (T250Q), substitution of Met at EU-index position 428 with Leu (M428L), substitution of Met at EU-index position 252 with Tyr (M252Y), substitution of Ser at EU-index position 254 with Thr (S254T), substitution of Thr at EU-index position 256 with Glu (T256E), substitution of Met at EU-index position 252 with Tyr (M252Y)/substitution of Ser at EU-index position 254 with Thr (S254T)/substitution of Thr at EU-index position 256 with Glu (T256E), substitution of Met at EU-index position 428 with Leu (M428L)/substitution of Asn at EU-index position 434 with Ser (N434S), substitution of Asn at EU-index position 434 with Ala (N434A), substitution of Asn at EU-index position 434 with His (N434H) or the like [J. Immunol., 2009, 182: p.7663-7671, MAbs, 2017, 9: p.844-853].

[0259] In a preferred embodiment, the mutated Fc region includes substitution of Cys at EU-index position 220 with Ser, of an amino acid sequence of a heavy chain of an antibody belonging to a human IgG1 subclass. Examples of the mutated Fc region according to this embodiment include an Fc region of an immunoglobulin including an amino acid sequence obtained by introducing into an Fc region (EU-index positions 217 to 447) in which a CH1 domain and Glu at EU-index position 216 of a hinge domain have been removed from a constant region (SEQ ID NO: 153) of a heavy chain of human IgG1, substitution of Cys at EU-index position 220, which is associated with the binding to a light chain, with Ser (C220S) (hereinafter referred to as g1S, SEQ ID NO: 72), an Fc region of an immunoglobulin including an amino acid sequence obtained by introducing into an Fc region (EU-index positions 216 to 447) in which a CH1 domain has been removed from a constant region (SEQ ID NO: 153) of a heavy chain of human IgG1, substitution of Cys at position 220 with Ser (C220S) (hereinafter referred to as Eg1S, SEQ ID NO: 156) or the like. When the DcR3 variant of the present invention includes the mutated Fc region according to this embodiment, as the first chimeric cysteine-rich region included in the DcR3 variant of the present invention, preferred is the first chimeric cysteine-rich region including substitution of CRD1 of wild-type DcR3 with CRD1 of OPG and substitution of CRD4 of wild-type DcR3 with CRD4 of OPG. When the DcR3 variant of the present invention includes the mutated Fc region according to this embodiment, the second chimeric cysteine-rich region included in the DcR3 variant of the present invention preferably includes substitution of Glu at position 57 with another amino acid, or substitution of Glu at position 57 with another amino acid and substitution of Arg at position 58 with another amino acid. Another amino acid used for substitution of Glu at position 57 is preferably selected from Lys, Leu, Arg, Val, Ala, Phe, His, Ile and Met, and more preferably selected from Lys, Leu, Arg and Val. Another amino acid used for substitution of Arg at position 58 is preferably selected from Asp, Glu and Thr, and more preferably selected from Asp and Glu. When combining substitution of Glu at position 57 with another amino acid and substitution of Arg at position 58 with another amino acid, it is preferable to combine substitution of Glu at position 57 with Lys, Leu, Arg, Val, Ala, Phe, His, Ile or Met and substitution of Arg at position 58 with Asp, Glu or Thr, it is more preferable to combine substitution of Glu at position 57 with Lys, Leu, Arg or Val and substitution of Arg at position 58 with Asp or Glu, and it is still more preferable to combine substitution of Glu at position 57 with Lys or Arg and substitution of Arg at position 58 with Asp or Glu.

[0260] In another preferred embodiment, the mutated Fc region includes substitution of Ser at EU-index position 228 with Pro, substitution of Leu at EU-index position 235 with Glu, and substitution of Arg at EU-index position 409 with Lys, of an amino acid sequence of a heavy chain of an antibody belonging to a human IgG4 subclass. Examples of the mutated Fc region according to this embodiment include Fc of an immunoglobulin including an amino acid sequence including, in addition to removal of a CH1 domain from a constant region (SEQ ID NO: 154) of a heavy chain of human IgG4, substitution of Ser at EU-index position 228 with Pro, substitution of Leu at EU-index position 235 with Glu, and substitution of Arg at EU-index position 409 with Lys as described in WO 2006/33386 A (hereinafter referred to as g4PEK, SEQ ID NO: 74). When the DcR3 variant of the present invention includes the mutated Fc region according to this embodiment, as the first chimeric cysteine-rich region included in the DcR3 variant of the present invention, preferred is the first chimeric cysteine-rich region including substitution of CRD1 of wild-type DcR3 with CRD1 of OPG, and substitution of CRD4 of wild-type DcR3 with CRD4 of OPG. When the DcR3 variant of the present invention includes the mutated Fc region according to this embodiment, the second chimeric cysteine-rich region included in the DcR3 variant of the present invention preferably includes substitution of Glu at position 57 with another amino acid, or substitution of Glu at position 57 with another amino acid and substitution of Arg at position 58 with another amino acid. Another amino acid used for substitution of Glu at position 57 is preferably selected from Lys, Leu, Arg, Val, Ala, Phe, His, Ile and Met, and more preferably selected from Lys, Leu, Arg and Val. Another amino acid used for substitution of Arg at position 58 is preferably selected from Asp, Glu and Thr, and more preferably selected from Asp and Glu. When combining substitution of Glu at position 57 with another amino acid and substitution of Arg at position 58 with another amino acid, it is preferable to combine substitution of Glu at position 57 with Lys, Leu, Arg, Val, Ala, Phe, His, Ile or Met and substitution of Arg at position 58 with Asp, Glu or Thr, it is more preferable to combine substitution of Glu at position 57 with Lys, Leu, Arg or Val and substitution of Arg at position 58 with Asp or Glu, and it is still more preferable to combine substitution of Glu at position 57 with Lys or Arg and substitution of Arg at position 58 with Asp or Glu.

[0261] In further another preferred embodiment, the mutated Fc region includes substitution of Leu at EU-index position 234 with Ala, substitution of Leu at EU-index position 235 with Ala, and substitution of Gly at EU-index position 237 with Ala, of an amino acid sequence of a heavy chain of an antibody belonging to a human IgG1 subclass. Examples of the mutated Fc region according to this embodiment include an Fc region of an immunoglobulin including an amino acid sequence obtained by introducing into an Fc region of g1S set forth in SEQ ID NO: 72 or Eg1S set forth in SEQ ID NO: 156, substitution of Leu at position 234 with Ala, substitution of Leu at position 235 with Ala, and substitution of Gly at position 237 with Ala (hereinafter referred to as g1S LALAGA or Eg1S LALAGA, SEQ ID NO: 162 or 164) or the like. When the DcR3 variant of the present invention includes the mutated Fc region according to this embodiment, as the first chimeric cysteine-rich region included in the DcR3 variant of the present invention, preferred is the first chimeric cysteine-rich region including substitution of CRD1 of wild-type DcR3 with CRD1 of OPG, and substitution of CRD4 of wild-type DcR3 with CRD4 of OPG. When the DcR3 variant of the present invention includes the mutated Fc region according to this embodiment, the second chimeric cysteine-rich region included in the DcR3 variant of the present invention preferably includes substitution of Glu at position 57 with another amino acid, or substitution of Glu at position 57 with another amino acid and substitution of Arg at position 58 with another amino acid. Another amino acid used for substitution of Glu at position 57 is preferably selected from Lys, Leu, Arg, Val, Ala, Phe, His, Ile and Met, and more preferably selected from Lys, Leu, Arg and Val. Another amino acid used for substitution of Arg at position 58 is preferably selected from Asp, Glu and Thr, and more preferably selected from Asp and Glu. When combining substitution of Glu at position 57 with another amino acid and substitution of Arg at position 58 with another amino acid, it is preferable to combine substitution of Glu at position 57 with Lys, Leu, Arg, Val, Ala, Phe, His, Ile or Met and substitution of Arg at position 58 with Asp, Glu or Thr, it is more preferable to combine substitution of Glu at position 57 with Lys, Leu, Arg or Val and substitution of Arg at position 58 with Asp or Glu, and it is still more preferable to combine substitution of Glu at position 57 with Lys or Arg and substitution of Arg at position 58 with Asp or Glu.

[0262] In further another preferred embodiment, the mutated Fc region includes substitution of Asn at EU-index position 434 with Ala, of an amino acid sequence of a heavy chain of an antibody belonging to a human IgG1 subclass. Examples of the mutated Fc region according to this embodiment include an Fc region of an immunoglobulin including an amino acid sequence obtained by introducing into an Fc region of g1S set forth in SEQ ID NO: 72 or Eg1S set forth in SEQ ID NO: 156, substitution of Asn at position 434 with Ala (hereinafter referred to as g1S N434A or Eg1S N434A, SEQ ID NO: 312 or 160), an Fc region of an immunoglobulin including an amino acid sequence obtained by introducing into an Fc region of g1S LALAGA set forth in SEQ ID NO: 162 or Eg1S LALAGA set forth in SEQ ID NO: 164, substitution of Asn at position 434 with Ala (hereinafter referred to as g1S LALAGANA or Eg1S LALAGANA, SEQ ID NO: 313 or 166) or the like. When the DcR3 variant of the present invention includes the mutated Fc region according to this embodiment, as the first chimeric cysteine-rich region included in the DcR3 variant of the present invention, preferred is the first chimeric cysteine-rich region including substitution of CRD1 of wild-type DcR3 with CRD1 of OPG, and substitution of CRD4 of wild-type DcR3 with CRD4 of OPG. When the DcR3 variant of the present invention includes the mutated Fc region according to this embodiment, the second chimeric cysteine-rich region included in the DcR3 variant of the present invention preferably includes substitution of Glu at position 57 with another amino acid, or substitution of Glu at position 57 with another amino acid and substitution of Arg at position 58 with another amino acid. Another amino acid used for substitution of Glu at position 57 is preferably selected from Lys, Leu, Arg, Val, Ala, Phe, His, Ile and Met, and more preferably selected from Lys, Leu, Arg and Val. Another amino acid used for substitution of Arg at position 58 is preferably selected from Asp, Glu and Thr, and more preferably selected from Asp and Glu. When combining substitution of Glu at position 57 with another amino acid and substitution of Arg at position 58 with another amino acid, it is preferable to combine substitution of Glu at position 57 with Lys, Leu, Arg, Val, Ala, Phe, His, Ile or Met and substitution of Arg at position 58 with Asp, Glu or Thr, it is more preferable to combine substitution of Glu at position 57 with Lys, Leu, Arg or Val and substitution of Arg at position 58 with Asp or Glu, and it is still more preferable to combine substitution of Glu at position 57 with Lys or Arg and substitution of Arg at position 58 with Asp or Glu.

[0263] In further another preferred embodiment, the mutated Fc region includes substitution of Met at EU-index position 252 with Tyr, substitution of Ser at EU-index position 254 with Thr, and substitution of Thr at EU-index position 256 with Glu, of an amino acid sequence of a heavy chain of an antibody belonging to a human IgG1 subclass. Examples of the mutated Fc region according to this embodiment include an Fc region of an immunoglobulin including an amino acid sequence obtained by introducing into an Fc region of g1S set forth in SEQ ID NO: 72 or Eg1S set forth in SEQ ID NO: 156, substitution of Met at position 252 with Tyr, substitution of Ser at position 254 with Thr, and substitution of Thr at position 256 with Glu (hereinafter referred to as g1S YTE or Eg1S YTE, SEQ ID NO: 311 or 158) or the like. When the DcR3 variant of the present invention includes the mutated Fc region according to this embodiment, as the first chimeric cysteine-rich region included in the DcR3 variant of the present invention, preferred is the first chimeric cysteine-rich region including substitution of CRD1 of wild-type DcR3 with CRD1 of OPG, and substitution of CRD4 of wild-type DcR3 with CRD4 of OPG. When the DcR3 variant of the present invention includes the mutated Fc region according to this embodiment, the second chimeric cysteine-rich region included in the DcR3 variant of the present invention preferably includes substitution of Glu at position 57 with another amino acid, or substitution of Glu at position 57 with another amino acid and substitution of Arg at position 58 with another amino acid. Another amino acid used for substitution of Glu at position 57 is preferably selected from Lys, Leu, Arg, Val, Ala, Phe, His, Ile and Met, and more preferably selected from Lys, Leu, Arg and Val. Another amino acid used for substitution of Arg at position 58 is preferably selected from Asp, Glu and Thr, and more preferably selected from Asp and Glu. When combining substitution of Glu at position 57 with another amino acid and substitution of Arg at position 58 with another amino acid, it is preferable to combine substitution of Glu at position 57 with Lys, Leu, Arg, Val, Ala, Phe, His, Ile or Met and substitution of Arg at position 58 with Asp, Glu or Thr, it is more preferable to combine substitution of Glu at position 57 with Lys, Leu, Arg or Val and substitution of Arg at position 58 with Asp or Glu, and it is still more preferable to combine substitution of Glu at position 57 with Lys or Arg and substitution of Arg at position 58 with Asp or Glu.

[0264] Examples of the mutated Fc region include, but are not limited to, a mutated Fc region including or consisting of an amino acid sequence set forth in SEQ ID NO: 72, 74, 156, 158, 160, 162, 164, 166, 311, 312 or 313 the amino acid sequence.

[0265] Examples of the peptide linker to be added in order to link further a homogeneous or heterogeneous peptide, polypeptide or protein to the N-terminal or C-terminal side of the chimeric cysteine-rich region include, but are not limited to, a peptide linker such as an IEGRMD linker or a GS linker, chemical linker or the like.

[0266] As the DcR3 variant of the present invention, most preferably a DcR3 variant including the first or second chimeric cysteine-rich region and the Fc region or the mutated Fc region is exemplified.

[0267] In one embodiment, examples of an amino acid sequence included in the DcR3 variant of the present invention include an amino acid sequence set forth in SEQ ID NO: 26, 28, 30, 32, 34, 36, 38, 40, 42, 44 or 46, or an amino acid sequence obtained by introducing into the amino acid sequence, deletion, substitution, insertion or addition of 1 to 30 amino acids. In this embodiment, the DcR3 variant of the present invention may consist of the abovementioned amino acid sequence or may include the abovementioned amino acid sequence, but preferably consists of the abovementioned amino acid sequence. The abovementioned amino acid sequence includes HBD.

[0268] In another embodiment, examples of an amino acid sequence included in the DcR3 variant of the present invention include an amino acid sequence set forth in SEQ ID NO: 50, 52, 54, 56, 58, 60, 62, 64, 66, 68, 70, 180, 182, 184, 186, 188, 270, 272, 274, 276, 278, 280, 282, 284 or 286, or an amino acid sequence obtained by introducing into the amino acid sequence, deletion, substitution, insertion or addition of 1 to 30 amino acids. In this embodiment, the DcR3 variant of the present invention may consist of the abovementioned amino acid sequence or may include the abovementioned amino acid sequence, but preferably consists of the abovementioned amino acid sequence. The abovementioned amino acid sequence does not include HBD.

[0269] In another embodiment, examples of an amino acid sequence included in the DcR3 variant of the present invention include an amino acid sequence including both of an amino acid sequence set forth in SEQ ID NO: 50, 52, 54, 56, 58, 60, 62, 64, 66, 68, 70, 180, 182, 184, 186, 188, 270, 272, 274, 276, 278, 280, 282, 284 or 286, or an amino acid sequence obtained by introducing into the amino acid sequence, deletion, substitution, insertion or addition of 1 to 30 amino acids, and, as a mutated Fc region, an amino acid sequence set forth in SEQ ID NO: 72, 74, 156, 158, 160, 162, 164, 166, 311, 312 or 313

[0270] In further another embodiment, examples of an amino acid sequence included in the DcR3 variant of the present invention include an amino acid sequence set forth in SEQ ID NO: 76, 78, 80, 82, 84, 86, 88, 90, 92, 94, 96, 98, 150, 168, 170, 172, 174, 176, 178, 190, 192, 194, 196, 198, 200, 202, 204, 206, 208, 210, 212, 214, 216, 218, 220, 222, 224, 226, 228, 230, 232, 234, 236, 238, 240, 242, 244, 246, 248, 250, 252, 254, 256, 258, 260, 262, 264, 266, 268, 288, 290, 292, 294, 296, 298, 300, 302, 304, 314, 315, 316, 317, 318, 319, 320, 321, 322, 323, 324, 325, 326, 327, 328, 329, 330, 331, 332, 333, 334, 335, 336 or 337, or an amino acid sequence obtained by introducing into the amino acid sequence, deletion, substitution, insertion or addition of 1 to 30 amino acids. In this embodiment, the DcR3 variant of the present invention may consist of the abovementioned amino acid sequence or may include the abovementioned amino acid sequence, but preferably consists of the abovementioned amino acid sequence. The abovementioned amino acid sequence includes an Fc region or a mutant thereof (mutated Fc region).

[0271] SEQ ID NO: 76 represents an amino acid sequence of chimera B-Fc (IEGRMD g1S) (a DcR3 variant obtained by fusion of chimera B, an IEGRMD linker and Fc (g1S)); SEQ ID NO: 78 represents an amino acid sequence of chimera C-Fc (IEGRMD g1S) (a DcR3 variant obtained by fusion of chimera C, an IEGRMD linker and Fc (g1S)); SEQ ID NO: 80 represents an amino acid sequence of chimera A-Fc (IEGRMD g1S) (a DcR3 variant obtained by fusion of chimera A, an IEGRMD linker and Fc (g1S)); SEQ ID NO: 82 represents an amino acid sequence of chimera A-Fc (g4PEK) (a DcR3 variant obtained by fusion of chimera A and Fc (g4PEK)); SEQ ID NO: 84 represents an amino acid sequence of 103-123OPG-Fc (g4PEK) (a DcR3 variant obtained by fusion of 103-123OPG and Fc (g4PEK)); SEQ ID NO: 86 represents an amino acid sequence of N131S/N144S-Fc (g4PEK) (a DcR3 variant obtained by fusion of N131S/N144S and Fc (g4PEK)); SEQ ID NO: 88 represents an amino acid sequence of T133A/S146A-Fc (g4PEK) (a DcR3 variant obtained by fusion of T133A/S146A and Fc (g4PEK)); SEQ ID NO: 90 represents an amino acid sequence of N131S/N144S/N157S-Fc (g4PEK) (a DcR3 variant obtained by fusion of N131S/N144S/N157S and Fc (g4PEK)); SEQ ID NO: 92 represents an amino acid sequence of T133A/S146A/T159A-Fc (g4PEK) (a DcR3 variant obtained by fusion of T133A/S146A/T159A and Fc (g4PEK)); SEQ ID NO: 94 represents an amino acid sequence of chimera A-E57K-Fc (g4PEK) (a DcR3 variant obtained by fusion of chimera A-E57K and Fc (g4PEK)); SEQ ID NO: 96 represents an amino acid sequence of chimera A-E57L-Fc (g4PEK) (a DcR3 variant obtained by fusion of chimera A-E57L and Fc (g4PEK)); SEQ ID NO: 98 represents an amino acid sequence of chimera A-R60K-Fc (g4PEK) (a DcR3 variant obtained by fusion of chimera A-R6OK and Fc (g4PEK)); SEQ ID NO: 150 represents an amino acid sequence of chimera A-Fc (g1S) (a DcR3 variant obtained by fusion of chimera A and Fc (g1S)); SEQ ID NO: 168 represents an amino acid sequence of chimera A-Fc (Eg1S) (a DcR3 variant obtained by fusion of chimera A and Fc (Eg1S)); SEQ ID NO: 170 represents an amino acid sequence of chimera A-Fc (Eg1S-YTE) (a DcR3 variant obtained by fusion of chimera A and Fc (Eg1S YTE)); SEQ ID NO: 172 represents an amino acid sequence of chimera A-Fc (Eg1S-N434A) (a DcR3 variant obtained by fusion of chimera A and Fc (Eg1S-N434A)); SEQ ID NO: 174 represents an amino acid sequence of chimera A-Fc (g1S-LALAGA) (a DcR3 variant obtained by fusion of chimera A and Fc (g1S-LALAGA)); SEQ ID NO: 176 represents an amino acid sequence of chimera A-Fc (Eg1S-LALAGA) (a DcR3 variant obtained by fusion of chimera A and Fc (Eg1S-LALAGA)); SEQ ID NO: 178 represents an amino acid sequence of chimera A-Fc (Eg1S-LALAGANA) (a DcR3 variant obtained by fusion of chimera A and Fc (Eg1S-LALAGANA)); SEQ ID NO: 190 represents an amino acid sequence of chimera A-E57R-Fc (g4PEK) (a DcR3 variant obtained by fusion of chimera A-E57R and Fc (g4PEK)); SEQ ID NO: 192 represents an amino acid sequence of chimera A-E57V-Fc (g4PEK) (a DcR3 variant obtained by fusion of chimera A-E57V and Fc (g4PEK)); SEQ ID NO: 194 represents an amino acid sequence of chimera A-E57K_R58D-Fc (g4PEK) (a DcR3 variant obtained by fusion of chimera A-E57K_R58D and Fc (g4PEK)); SEQ ID NO: 196 represents an amino acid sequence of chimera A-E57K_R58E-Fc (g4PEK) (a DcR3 variant obtained by fusion of chimera A-E57K_R58E and Fc (g4PEK)); SEQ ID NO: 198 represents an amino acid sequence of chimera A-E57R_R58D-Fc (g4PEK) (a DcR3 variant obtained by fusion of chimera A-E57R R58D and Fc (g4PEK)); SEQ ID NO: 200 represents an amino acid sequence of chimera A-E57K-Fc (Eg1S) (a DcR3 variant obtained by fusion of chimera A-E57K and Fc (Eg1S)); SEQ ID NO: 202 represents an amino acid sequence of chimera A-E57L-Fc (Eg1S) (a DcR3 variant obtained by fusion of chimera A-E57L and Fc (Eg1S)); SEQ ID NO: 204 represents an amino acid sequence of chimera A-E57R-Fc (Eg1S) (a DcR3 variant obtained by fusion of chimera A-E57R and Fc (Eg1S)); SEQ ID NO: 206 represents an amino acid sequence of chimera A-E57V-Fc (Eg1S) (a DcR3 variant obtained by fusion of chimera A-E57V and Fc (Eg1S)); SEQ ID NO: 208 represents an amino acid sequence of chimera A-E57K_R58D-Fc (Eg1S) (a DcR3 variant obtained by fusion of chimera A-E57K_R58D and Fc (Eg1S)); SEQ ID NO: 210 represents an amino acid sequence of chimera A-E57K_R58E-Fc (Eg1S) (a DcR3 variant obtained by fusion of chimera A-E57K_R58E and Fc (Eg1S)); SEQ ID NO: 212 represents an amino acid sequence of chimera A-E57R R58D-Fc (Eg1S) (a DcR3 variant obtained by fusion of chimera A-E57R_R58D and Fc (Eg1S)); SEQ ID NO: 214 represents an amino acid sequence of chimera A-E57K-Fc (Eg1S YTE) (a DcR3 variant obtained by fusion of chimera A-E57K and Fc (Eg1S YTE)); SEQ ID NO: 216 represents an amino acid sequence of chimera A-E57L-Fc (Eg1S YTE) (a DcR3 variant obtained by fusion of chimera A-E57L and Fc (Eg1S YTE)); SEQ ID NO: 218 represents an amino acid sequence of chimera A-E57R-Fc (Eg1S YTE) (a DcR3 variant obtained by fusion of chimera A-E57R and Fc (Eg1S YTE)); SEQ ID NO: 220 represents an amino acid sequence of chimera A-E57V-Fc (Eg1S YTE) (a DcR3 variant obtained by fusion of chimera A-E57V and Fc (Eg1S YTE)); SEQ ID NO: 222 represents an amino acid sequence of chimera A-E57K_R58D-Fc (Eg1S YTE) (a DcR3 variant obtained by fusion of chimera A-E57K_R58D and Fc (Eg1S YTE)); SEQ ID NO: 224 represents an amino acid sequence of chimera A-E57K_R58E-Fc (Eg1S YTE) (a DcR3 variant obtained by fusion of chimera A-E57K_R58E and Fc (Eg1S YTE)); SEQ ID NO: 226 represents an amino acid sequence of chimera A-E57R R58D-Fc (Eg1S YTE) (a DcR3 variant obtained by fusion of chimera A-E57R_R58D and Fc (Eg1S YTE)); SEQ ID NO: 228 represents an amino acid sequence of chimera A-E57K-Fc (Eg1S N434A) (a DcR3 variant obtained by fusion of chimera A-E57K and Fc (Eg1S N434A)); SEQ ID NO: 230 represents an amino acid sequence of chimera A-E57L-Fc (Eg1S N434A) (a DcR3 variant obtained by fusion of chimera A-E57L and Fc (Eg1S N434A)); SEQ ID NO: 232 represents an amino acid sequence of chimera A-E57R-Fc (Eg1S N434A) (a DcR3 variant obtained by fusion of chimera A-E57R and Fc (Eg1S N434A)); SEQ ID NO: 234 represents an amino acid sequence of chimera A-E57V-Fc (Eg1S N434A) (a DcR3 variant obtained by fusion of chimera A-E57V and Fc (Eg1S N434A)); SEQ ID NO: 236 represents an amino acid sequence of chimera A-E57K_R58D-Fc (Eg1S N434A) (a DcR3 variant obtained by fusion of chimera A-E57K_R58D and Fc (Eg1S N434A)); SEQ ID NO: 238 represents an amino acid sequence of chimera A-E57K R58E-Fc (Eg1S N434A) (a DcR3 variant obtained by fusion of chimera A-E57K_R58E and Fc (Eg1S N434A)); SEQ ID NO: 240 represents an amino acid sequence of chimera A-E57R R58D-Fc (Eg1S N434A) (a DcR3 variant obtained by fusion of chimera A-E57R_R58D and Fc (Eg1S N434A)); SEQ ID NO: 242 represents an amino acid sequence of chimera A-E57K-Fc (Eg1S LALAGA) (a DcR3 variant obtained by fusion of chimera A-E57K and Fc (Eg1S LALAGA)); SEQ ID NO: 244 represents an amino acid sequence of chimera A-E57L-Fc (Eg1S LALAGA) (a DcR3 variant obtained by fusion of chimera A-E57L and Fc (Eg1S LALAGA)); SEQ ID NO: 246 represents an amino acid sequence of chimera A-E57R-Fc (Eg1S LALAGA) (a DcR3 variant obtained by fusion of chimera A-E57R and Fc (Eg1S LALAGA)); SEQ ID NO: 248 represents an amino acid sequence of chimera A-E57V-Fc (Eg1S LALAGA) (a DcR3 variant obtained by fusion of chimera A-E57V and Fc (Eg1S LALAGA)); SEQ ID NO: 250 represents an amino acid sequence of chimera A-E57K_R58D-Fc (Eg1S LALAGA) (a DcR3 variant obtained by fusion of chimera A-E57K_R58D and Fc (Eg1S LALAGA)); SEQ ID NO: 252 represents an amino acid sequence of chimera A-E57K_R58E-Fc (Eg1S LALAGA) (a DcR3 variant obtained by fusion of chimera A-E57K_R58E and Fc (Eg1S LALAGA)); SEQ ID NO: 254 represents an amino acid sequence of chimera A-E57R_R58D-Fc (Eg15 LALAGA) (a DcR3 variant obtained by fusion of chimera A-E57R_R58D and Fc (Eg1S LALAGA)); SEQ ID NO: 256 represents an amino acid sequence of chimera A-E57K-Fc (Eg1S LALAGANA) (a DcR3 variant obtained by fusion of chimera A-E57K and Fc (Eg1S LALAGANA)); SEQ ID NO: 258 represents an amino acid sequence of chimera A-E57L-Fc (Eg1S LALAGANA) (a DcR3 variant obtained by fusion of chimera A-E57L and Fc (Eg1S LALAGANA)); SEQ ID NO: 260 represents an amino acid sequence of chimera A-E57R-Fc (Eg1S LALAGANA) (a DcR3 variant obtained by fusion of chimera A-E57R and Fc (Eg1S LALAGANA)); SEQ ID NO: 262 represents an amino acid sequence of chimera A-E57V-Fc (Eg1S LALAGANA) (a DcR3 variant obtained by fusion of chimera A-E57V and Fc (Eg1S LALAGANA)); SEQ ID NO: 264 represents an amino acid sequence of chimera A-E57K_R58D-Fc (Eg1S LALAGANA) (a DcR3 variant obtained by fusion of chimera A-E57K R58D and Fc (Eg1S LALAGANA)); SEQ ID NO: 266 represents an amino acid sequence of chimera A-E57K_R58E-Fc (Eg1S LALAGANA) (a DcR3 variant obtained by fusion of chimera A-E57K_R58E and Fc (Eg1S LALAGANA)); SEQ ID NO: 268 represents an amino acid sequence of chimera A-E57R_R58D-Fc (Eg1S LALAGANA) (a DcR3 variant obtained by fusion of chimera A-E57R_R58D and Fc (Eg1S LALAGANA)); SEQ ID NO: 288 represents an amino acid sequence of chimera A-E57A-Fc (g4PEK) (a DcR3 variant obtained by fusion of chimera A-E57A and Fc (g4PEK)); SEQ ID NO: 290 represents an amino acid sequence of chimera A-E57F-Fc (g4PEK) (a DcR3 variant obtained by fusion of chimera A-E57F and Fc (g4PEK)); SEQ ID NO: 292 represents an amino acid sequence of chimera A-E57H-Fc (g4PEK) (a DcR3 variant obtained by fusion of chimera A-E57H and Fc (g4PEK)); SEQ ID NO: 294 represents an amino acid sequence of chimera A-E57I-Fc (g4PEK) (a DcR3 variant obtained by fusion of chimera A-E571 and Fc (g4PEK)); SEQ ID NO: 296 represents an amino acid sequence of chimera A-E57M-Fc (g4PEK) (a DcR3 variant obtained by fusion of chimera A-E57M and Fc (g4PEK)); SEQ ID NO: 298 represents an amino acid sequence of chimera A-E57K_R58T-Fc (g4PEK) (a DcR3 variant obtained by fusion of chimera A-E57K_R58T and Fc (g4PEK)); SEQ ID NO: 300 represents an amino acid sequence of chimera A-E57L_R58E-Fc (g4PEK) (a DcR3 variant obtained by fusion of chimera A-E57L_R58E and Fc (g4PEK)); SEQ ID NO: 302 represents an amino acid sequence of chimera A-E57V R58T-Fc (g4PEK) (a DcR3 variant obtained by fusion of chimera A-E57V_R58T and Fc (g4PEK)); SEQ ID NO: 304 represents an amino acid sequence of chimera A-E57V_R58E-Fc (g4PEK) (a DcR3 variant obtained by fusion of chimera A-E57V_R58E and Fc (g4PEK)); SEQ ID NO: 314 represents an amino acid sequence of chimera A-Fc (g1S YTE) (a DcR3 variant obtained by fusion of chimera A and Fc (g1S YTE)); SEQ ID NO: 315 represents an amino acid sequence of chimera A-Fc (g1S N434A) (a DcR3 variant obtained by fusion of chimera A and Fc (g1S N434A)); SEQ ID NO: 316 represents an amino acid sequence of chimera A-Fc (g1S LALAGANA) (a DcR3 variant obtained by fusion of chimera A and Fc (g1S LALAGANA)); SEQ ID NO: 317 represents an amino acid sequence of chimera A-E57K-Fc (g1S YTE) (a DcR3 variant obtained by fusion of chimera A-E57K and Fc (g1S YTE)); SEQ ID NO: 318 represents an amino acid sequence of chimera A-E57L-Fc (g1S YTE) (a DcR3 variant obtained by fusion of chimera A-E57L and Fc (g1S YTE)); SEQ ID NO: 319 represents an amino acid sequence of chimera A-E57R-Fc (g1S YTE) (a DcR3 variant obtained by fusion of chimera A-E57R and Fc (g1S YTE)); SEQ ID NO: 320 represents an amino acid sequence of chimera A-E57V-Fc (g1S YTE) (a DcR3 variant obtained by fusion of chimera A-E57V and Fc (g1S YTE)); SEQ ID NO: 321 represents an amino acid sequence of chimera A-E57K_R58D-Fc (g1S YTE) (a DcR3 variant obtained by fusion of chimera A-E57K_R58D and Fc (g1S YTE)); SEQ ID NO: 322 represents an amino acid sequence of chimera A-E57K_R58E-Fc (g1S YTE) (a DcR3 variant obtained by fusion of chimera A-E57K_R58E and Fc (g1S YTE)); SEQ ID NO: 323 represents an amino acid sequence of chimera A-E57R R58D-Fc (g1S YTE) (a DcR3 variant obtained by fusion of chimera A-E57R_R58D and Fc (g1S YTE)); SEQ ID NO: 324 represents an amino acid sequence of chimera A-E57K-Fc (g1S N434A) (a DcR3 variant obtained by fusion of chimera A-E57K and Fc (g1S N434A)); SEQ ID NO: 325 represents an amino acid sequence of chimera A-E57L-Fc (g1S N434A) (a DcR3 variant obtained by fusion of chimera A-E57L and Fc(g1S N434A)); SEQ ID NO: 326 represents an amino acid sequence of chimera A-E57R-Fc (g1S N434A) (a DcR3 variant obtained by fusion of chimera A-E57R and Fc (g1S N434A)); SEQ ID NO: 327 represents an amino acid sequence of chimera A-E57V-Fc (g1S N434A) (a DcR3 variant obtained by fusion of chimera A-E57V and Fc (g1S N434A)); SEQ ID NO: 328 represents an amino acid sequence of chimera A-E57K_R58D-Fc (g1S N434A) (a DcR3 variant obtained by fusion of chimera A-E57K_R58D and Fc (g1S N434A)); SEQ ID NO: 329 represents an amino acid sequence of chimera A-E57K_R58E-Fc (g1S N434A) (a DcR3 variant obtained by fusion of chimera A-E57K_R58E and Fc (g1S N434A)); SEQ ID NO: 330 represents an amino acid sequence of chimera A-E57R_R58D-Fc (g1S N434A) (a DcR3 variant obtained by fusion of chimera A-E57R_R58D and Fc (g1S N434A)); SEQ ID NO: 331 represents an amino acid sequence of chimera A-E57K-Fc (g1S LALAGANA) (a DcR3 variant obtained by fusion of chimera A-E57K and Fc (g1S LALAGANA)); SEQ ID NO: 332 represents an amino acid sequence of chimera A-E57L-Fc (g1S LALAGANA) (a DcR3 variant obtained by fusion of chimera A-E57L and Fc (g1S LALAGANA)); SEQ ID NO: 333 represents an amino acid sequence of chimera A-E57R-Fc (g1S LALAGANA) (a DcR3 variant obtained by fusion of chimera A-E57R and Fc (g1S LALAGANA)); SEQ ID NO: 334 represents an amino acid sequence of chimera A-E57V-Fc (g1S LALAGANA) (a DcR3 variant obtained by fusion of chimera A-E57V and Fc (g1S LALAGANA)); SEQ ID NO: 335 represents an amino acid sequence of chimera A-E57K_R58D-Fc (g1S LALAGANA) (a DcR3 variant obtained by fusion of chimera A-E57K_R58D and Fc (g1S LALAGANA)); SEQ ID NO: 336 represents an amino acid sequence of chimera A-E57K_R58E-Fc (g1S LALAGANA) (a DcR3 variant obtained by fusion of chimera A-E57K_R58E and Fc (g1S LALAGANA)); and SEQ ID NO: 337 represents an amino acid sequence of chimera A-E57R_R58D-Fc (g1S LALAGANA) (a DcR3 variant obtained by fusion of chimera A-E57R_R58D and Fc (g1S LALAGANA)).

[0272] In any of the abovementioned embodiments, the mutation (modification) to be added to the abovementioned amino acid sequence may be a natural mutation or an artificial substitution, deletion, insertion or addition of an amino acid. In any of the abovementioned embodiments, examples of an amino acid sequence obtained by introducing into the abovementioned amino acid sequence, deletion, substitution, insertion or addition of 1 to 30 amino acids include an amino acid sequence obtained by introducing into the abovementioned amino acid sequence, deletion, substitution, insertion or addition of 1 or 2 or more, preferably 2 to 30, more preferably 2 to 10, and particularly preferably 2 to 5 amino acids, or an amino acid sequence having 80% or more, preferably 85% or more, more preferably 90% or more, for example, 93% or more, 95% or more, 97% or more, 98% or more or 99% or more identity to the abovementioned amino acid sequence.

[0273] The DcR3 variant of the present invention may be further chemically modified in order to change the biological activity or properties thereof, in vivo kinetics such as half-life in blood, or physical or chemical properties such as stability of a protein.

[0274] Examples of the chemical modification include polyethylene glycolylation (PEGylation), acetylation, amidation or phosphorylation or the like, and PEGylation is particularly preferable. PEGylation means, for example, binding of one or a plurality of PEG molecules to an amino group of the N-terminus of a protein, or an amino acid residue having a functional group, such as an E-amino group of Lys, a carboxyl group, a thiol group or a hydroxyl group, at the side chain.

[0275] The average molecular weight of the PEG molecule can be used in the range of about 3,000 to about 50,000, but it is not limited thereto.

[0276] Examples of the method for binding the PEG molecule to the DcR3 variant include a method introducing, for example, an active group such as a carboxyl group, a formyl (aldehyde) group, an N-hydroxysuccinimide ester group, an amino group, a thiol group or a maleimide group into the PEG terminal part, thus reacting with a functional group such as an amino group, a carboxyl group, a thiol group or a hydroxyl group included at the side chain of the DcR3 variant.

[0277] Examples of the signal peptide include, but are not limited to, a signal peptide of human DcR3 consisting of an amino acid sequence at positions 1 to 29 of the amino acid sequence set forth in SEQ ID NO: 2 when the CRD domain at the N-terminal side included in the DcR3 variant is derived from human DcR3. When the CRD domain at the N-terminal side included in the DcR3 variant is derived from human OPG, a signal peptide derived from human OPG consisting of an amino acid sequence at positions 1 to 21 of the amino acid sequence set forth in SEQ ID NO: 14 is exemplified. All of an artificial sequence, a sequence derived from an expression vector, and a sequence derived from another protein suitable for a host cell in which a DcR3 variant is expressed are also included in the signal peptide of the present invention. A DcR3 variant including the signal peptide is a premature polypeptide, and in one embodiment, the signal peptide is cleaved in a maturation process. The DcR3 variant of the present invention also includes a DcR3 variant having a different N-terminus resulting from cleavage of the abovementioned signal peptide at a position different from a predicted site.

### 5. Method for Producing DcR3 Variant

[0278] The DcR3 variant of the present invention can be produced by using the method mentioned in Molecular Cloning: A Laboratory Manual, 3rd edition, Cold Spring Harbor Laboratory Press (2001) or the like and expressing a DNA encoding the DcR3 variant in a host cell by, for example, the following method.

[0279] Examples of the signal peptide include, but are not limited to, a signal peptide of human DcR3 consisting of an amino acid sequence at positions 1 to 29 set forth in SEQ ID NO: 2 when the CRD domain at the N-terminal side included in the DcR3 variant is derived from human DcR3. When the CRD domain at the N-terminal side included in the DcR3 variant is derived from human OPG, a signal peptide derived from human OPG consisting of an amino acid sequence at positions 1 to 21 set forth in SEQ ID NO: 14 is exemplified. All of an artificial sequence, a sequence derived from an expression vector, and a sequence derived from another protein suitable for a host cell in which a DcR3 variant is expressed can also be used for production of the DcR3 variant of the present invention. The DcR3 variant of the present invention also includes a DcR3 variant having a different N-terminus obtained by cleaving the abovementioned signal peptide at a position different from a predicted site.

[0280] The DcR3 variant of the present invention can be obtained by artificially designing based on an amino acid sequence of a cysteine-rich region of wild-type DcR3 before amino acid substitution, an amino acid sequence of a cysteine-rich region of a DcR3 variant, or an amino acid sequence of a DcR3 variant, or can be obtained by analyzing a mutant. As the mutation introduction method, a site-specific mutagenesis method utilizing the PCR method using a primer is preferable (Kunkel et al., Proc. Natl. Acad. Sci. USA, 1985, 82: 488-492). Other examples thereof include a method for totally synthesizing a gene including a mutation introduced thereinto, or a method in which, using a primer including a mutation, PCR is performed for a part before a mutation site and a part after the mutation site separately, and the two fragments are linked by an overlap of a region including the mutation, followed by insertion into a vector by the in-fusion cloning method (Clontech Laboratories, Inc.) or the like.

[0281] Examples of the method for identifying a mutation having a target binding mode include a method for obtaining a mutant having a target binding mode by producing a library including mutations randomly introduced thereinto, displaying it on a phage, a yeast or the like, and performing screening using the binding activity. Alternatively, exemplified is a method for obtaining a mutant having a target binding mode by expressing in a host cell a vector including a DNA mutation thereinto for substituting a certain amino acid with a different amino acid and producing the mutant. The DNA encoding the DcR3 variant of the present invention can be synthesized with a DNA synthesizer by designing, from the amino acid sequence of the DcR3 variant of the present invention, a nucleotide sequence encoding it. The DNA can also be isolated by PCR using a cDNA of a human or the like as a template.

[0282] By inserting the DNA encoding the DcR3 variant of the present invention obtained above into downstream of a promoter of an appropriate expression vector, a recombinant vector is produced, and the recombinant vector is introduced into a host cell compatible with the expression vector.

[0283] As the nucleotide sequence of the DNA encoding the DcR3 variant, a nuceleotide can be substituted so that the codon is optimal for expression in a host, thereby it is possible to improve the production rate of a target DcR3 variant. When the DNA encoding the DcR3 variant mentioned above is produced, it is possible to produce the DNA by adding a DNA encoding a signal peptide of a secretory protein at the 5′ end thereof, using the DNA to produce a recombinant vector in the same manner as mentioned above, and introducing the recombinant vector into a host cell to allow secretion of the peptide into a medium. Examples of the signal peptide include a sequence derived from DcR3 or OPG, an artificial sequence, a sequence derived from an expression vector, or a sequence derived from another protein suitable for a host cell.

[0284] In one embodiment, examples of the nucleotide sequence of the DNA encoding the amino acid sequence of the DcR3 variant include nucleotide sequences set forth in SEQ ID NO: 25, 27, 29, 31, 33, 35, 37, 39, 41, 43 and 45.

[0285] In another embodiment, examples of the nucleotide sequence of the DNA encoding the amino acid sequence of the DcR3 variant include nucleotide sequences set forth in SEQ ID NO: 49, 51, 53, 55, 57, 59, 61, 63, 65, 67, 69, 179, 181, 183, 185, 187, 269, 271, 273, 275, 277, 279, 281, 283 and 285.

[0286] In further another embodiment, examples of the nucleotide sequence of the DNA encoding the amino acid sequence of the DcR3 variant include nucleotide sequences set forth in SEQ ID NO: 75, 77, 79, 81, 83, 85, 87, 89, 91, 93, 95, 97, 149, 167, 169, 171, 173, 175, 177, 189, 191, 193, 195, 197, 199, 201, 203, 205, 207, 209, 211, 213, 215, 217, 219, 221, 223, 225, 227, 229, 231, 233, 235, 237, 239, 241, 243, 245, 247, 249, 251, 253, 255, 257, 259, 261, 263, 265, 267, 287, 289, 291, 293, 295, 297, 299, 301 and 303.

[0287] As the expression vector, any expression vector can be used as long as autonomous replication in a host cell used or integration into a chromosome is possible, and an appropriate promoter is contained at a position such that a DNA encoding a polypeptide can be transcribed.

[0288] As the host cell, any cell can be used as long as it can express a gene encoding a DcR3 variant, such as a yeast, an insect cell or an animal cell. Preferably a yeast, animal cell or insect cell that is capable of glycosylating a protein is exemplified.

[0289] Examples of the yeast include a microorganism belonging to the genus Saccharomyces, the genus Schizosaccharomyces, the genus Kluyveromyces, the genus Trichosporon, the genus Schwanniomyces, the genus Pichia, the genus Candida or the like, for example, Saccharomyces cerevisiae, Schizosaccharomyces pombe, Kluyveromyces lactis, Trichosporon pullulans, Schwanniomyces alluvius, or Candida utilis or the like.

[0290] Examples of the insect cell include Sf9 or Sf21, which is an ovary cell of Spodoptera frugiperda [Baculovirus Expression Vectors, A Laboratory Manual, W. H. Freeman and Company, New York (1992)], High 5 (manufactured by Invitrogen), which is an ovary cell of Trichoplusia ni, or an S2 (Schneider 2) cell (Thermo Scientific) derived from a terminal embryo of

[0291] Drosophila melanogaster.

[0292] Examples of the animal cell include a Namalwa cell, which is a human cell, a COS cell, which is a monkey cell, a CHO cell, which is a Chinese hamster cell [Journal of Experimental Medicine, 108, 945 (1958); Proc. Natl. Acad. Sci. USA, 60, 1275 (1968); Genetics, 55, 513 (1968); Chromosoma, 41, 129 (1973); Methods in Cell Science, 18, 115 (1996); Radiation Research, 148, 260 (1997); Proc. Natl. Acad. Sci. USA, 77, 4216 (1980); Proc. Natl. Acad. Sci. USA, 60, 1275 (1968); Cell, 6, 121 (1975); Molecular Cellgenetics, Appendix I, II (pp.883-900)], CHO/DG44, CHO-K1 (ATCC Number:CCL-61), an Freestyle CHO—S cell, an CHO cell deficient in a dihydrofolate reductase gene [Proc. Natl. Acad. Sci. USA, 77, 4216 (1980)], a CHO cell deficient in a 6-fucose transferase gene (WO 2005/035586 A, WO 02/31140 A), a 293 cell, which is a human cell (ATCC Number: CRL-1573), a Freestyle 293F cell, an Expi293 cell (Thermo Scientific), DUkXB11 (ATCC Number: CCL-9096), Pro-5 (ATCC Number: CCL-1781), CHO—S(Life Technologies, Cat#11619), Pro-3, a rat myeloma cell YB2/3HL.P2.G11.16Ag.20 (or also referred to as YB2/0), a mouse myeloma cell NSO, a mouse myeloma cell SP2/0-Ag14, or a Syrian hamster cell BHK, HBT5637 (JP 63-299 A) or the like

[0293] When a yeast is used as a host cell, examples of the expression vector can include YEPβ(ATCC Number: 37115), YEp24 (ATCC37051), YCp50 (ATCC37419), pHS19 or pHS15 or the like.

[0294] As the promoter, any promoter may be used as long as it can function in a yeast strain, and examples thereof can include a promoter of a glycolytic gene such as hexosekinase, a PHO5 promoter, a PGK promoter, a GAP promoter, an ADH promoter, a gal 1 promoter, a gal 10 promoter, a heat shock polypeptide promoter, an MFa1 promoter or a CUP 1 promoter or the like.

[0295] As the method for introducing a recombinant vector, any method can be used as long as it introduces a DNA into a yeast, and examples thereof can include the electroporation method [Methods Enzymol., 194, 182 (1990)], the spheroplast method [Proc. Natl. Acad. Sci. USA, 75, 1929 (1978)], the lithium acetate method [J. Bacteriology, 153, 163 (1983)], or the method mentioned in Proc. Natl. Acad. Sci. USA, 75, 1929 (1978) or the like.

[0296] When an insect cell is used as a host, it is possible to express a peptide by the method mentioned in, for example, Current Protocols in Molecular Biology, Baculovirus Expression Vectors, A Laboratory Manual, W. H. Freeman and Company, New York (1992), Bio/Technology, 6, 47 (1988) or the like.

[0297] In other words, a recombinant gene transfer vector and a defective baculovirus genome are co-introduced into an insect cell to obtain a recombinant virus in the insect cell culture supernatant, followed by further infection of an insect cell with the recombinant virus, thereby it is possible to express a peptide.

[0298] Examples of the gene transfer vector used in the method can include pVL1392, pVL1393 (manufactured by Becton, Dickinson and Company), or pBlueBac4.5 (manufactured by Invitrogen) or the like.

[0299] As the baculovirus, it is possible to use, for example, an Autographa californica nuclear polyhedrosis virus, which is a virus which can infect a Noctuidae insect or the like.

[0300] Examples of the method for co-introducing the abovementioned recombinant gene transfer vector and the abovementioned baculovirus into an insect cell in order to prepare a recombinant virus can include the calcium phosphate method (JP 2-227075 A) or the lipofection method [Proc. Natl. Acad. Sci. USA, 84, 7413 (1987)] or the like.

[0301] When an S2 (Schneider 2) cell (Thermo Scientific) corresponding to an insect cell derived from a terminal embryo of Drosophila melanogaster is used as a host, it is possible to express a peptide by introducing a gene transfer vector such as pMTBiPV5-HisA (Thermo Scientific) into a host cell by the calcium phosphate method, for example, using the method mentioned in Mol. Biotechnol., 2015, 10: p.914-922 or the like.

[0302] When an animal cell is used as a host, examples of the expression vector can include a pCI mammalian expression vector (Promega Corporation), pcDNA3.1(+) (manufactured by Invitrogen), pcDNA I/Amp, pcDNA I, pcDM8 (manufactured by Funakoshi Co., Ltd.), pAGE107 [JP 3-22979 A, Cytotechnology, 3, 133 (1990)], pAS3-3 (JP 2-227075 A), pCDM8 [Nature, 329, 840 (1987)], pREP4 (manufactured by Invitrogen), pAGE103 [J. Biochem., 101, 1307 (1987)], pAGE210, pME18SFL3, or pKANTEX93 (WO 97/10354 A) or the like.

[0303] As the promoter, any promoter can be used as long as it functions in an animal cell, and examples thereof can include a promoter of an immediate early (IE) gene of a cytomegalovirus (CMV), an early promoter of SV40, a promoter of a retrovirus, a metallothionein promoter, a heat shock promoter, or an SRα promoter or the like. An enhancer of an IE gene of human CMV may be used together with a promoter.

[0304] As the method for introducing a recombinant vector into an animal cell, any method can be used as long as it introduces a DNA into an animal cell, and examples thereof can include the electroporation method [Cytotechnology, 3, 133 (1990)], the calcium phosphate method (JP 2-227075 A), the lipofection method [Proc. Natl. Acad. Sci. USA, 84, 7413 (1987)], or the method mentioned in Virology, 52, 456 (1973) or the like.

[0305] By using expression vectors of the DcR3 variant of the present invention obtained by the abovementioned method, or expression vectors obtained by modifying them, it is possible to transiently express the DcR3 variant.

[0306] As the host cell into which an expression vector is introduced, any cell can be used as long as it is a host cell that can express the DcR3 variant, and, for example, a COS-7 cell (ATCC Number: CRL1651) is used [Methods in Nucleic Acids Res., CRC Press, 283 (1991)]. For introduction of an expression vector into a COS-7 cell, the DEAE-dextran method [Methods in Nucleic Acids Res., CRC Press, (1991)], or the lipofection method [Proc. Natl. Acad. Sci. USA, 84, 7413 (1987)] or the like is used.

[0307] When a CHO—S cell or an Expi293 cell (Thermo Scientific) is used, the lipofection method [Proc. Natl. Acad. Sci. USA, 84, 7413 (1987)] or the like is used for introduction of an expression vector.

[0308] By using expression vectors of the DcR3 variant of the present invention obtained by the abovementioned method, or expression vectors obtained by modifying them, it is possible to obtain a transformant stably expressing the DcR3 variant.

[0309] After introduction of an expression vector, the transformant stably expressing a gene recombinant antibody is selected by culturing in a medium for culture of animal cells containing a drug such as G418 sulfate (JP 2-257891 A).

[0310] When the transformant is a transformant obtained using a eukaryote such as a yeast as a host, as the culture medium of the transformant, any of a natural medium or a synthetic medium can be used as long as the medium contains a carbon source, a nitrogen source and/or inorganic salts that can be assimilated by the transformant, and the medium can efficiently culture the transformant.

[0311] As the carbon source, any carbon source may be used as long as the transformant can assimilate it, and it is possible to use, for example, carbohydrates such as glucose, fructose, sucrose, molasses containing these, starch or starch hydrolysates; organic acids such as acetic acid or propionic acid; alcohols such as ethanol or propanol; or the like.

[0312] As the nitrogen source, it is possible to use, for example, ammonium salts of inorganic acids or organic acids such as ammonia, ammonium chloride, ammonium sulfate, ammonium acetate and/or ammonium phosphate; other nitrogen-containing compounds, as well as peptone, meat extracts, yeast extracts, corn steep liquor, casein hydrolysates, soybean meal and soybean meal hydrolysates, various fermentative bacterial cells and digests thereof or the like.

[0313] As the inorganic salt, it is possible to use, for example, monopotassium phosphate, dipotassium phosphate, magnesium phosphate, magnesium sulfate, sodium chloride, ferrous sulfate, manganese sulfate, copper sulfate and/or calcium carbonate or the like.

[0314] Culture is preferably performed under aerobic conditions such as shaking culture or deep aeration stirring culture. The culture temperature is preferably 15 to 40° C., and the culture time is preferably usually 16 hours to 7 days. The pH during culture is preferably kept at 3.0 to 9.0. The pH can be adjusted using an inorganic or organic acid, an alkali solution, urea, calcium carbonate or ammonia or the like.

[0315] During culture, if necessary, an antibiotic such as ampicillin or tetracycline may be added to a medium.

[0316] As the culture medium of the transformant obtained using an insect cell as a host, it is possible to use a TNM-FH medium (manufactured by Becton, Dickinson and Company), an Sf-900 II SFM medium (manufactured by Invitrogen), ExCe11400, ExCe11405(both are manufactured by JRH Biosciences, Inc.), a Grace's insect medium [Nature, 195, 788 (1962)], or Schneider's Medium (Thermo Fisher Scientific, Inc.), which is generally used, or the like.

[0317] Regarding the culture of the transformant obtained using an insect cell as a host, usually it is preferable that the pH is 6 to 7 and the temperature is 25 to 30° C., and the culture is preferably performed for 1 to 5 days. During culture, if necessary, an antibiotic such as gentamicin may be added to a medium.

[0318] As the medium for animal cell culture, used is an RPMI 1640 medium (manufactured by Invitrogen), a GIT medium (manufactured by NIHON PHARMACEUTICAL CO., LTD.), an EX-CELL301 medium (manufactured by JRH Biosciences, Inc.), an EX-CELL325 PF CHO serum-Free medium (Sigma-Aldrich Co., LLC), an IMDM medium (manufactured by Invitrogen), a Hybridoma-SFM medium (manufactured by Invitrogen), an Eagle's minimal essential medium (MEM) [Science, 122, 501 (1952)], a Dulbecco's modified Eagle's medium [Virology, 8, 396 (1959)], a 199 medium [Proceeding of the Society for the Biological Medicine, 73, 1 (1950)] or a medium obtained by adding various additives such as FBS to these media or the like.

[0319] Culture of an animal cell is usually preferably performed in the presence of 5% CO2, and it is preferable that the pH is 6 to 8 and the temperature is 30 to 40° C., and the culture is preferably performed for 1 to 7 days. During culture, if necessary, an antibiotic such as kanamycin or penicillin may be added to a medium.

[0320] By culturing the transformant thus obtained in a medium, the DcR3 variant is expressed and accumulated in a culture supernatant. The transformant can increase the expression amount of the DcR3 variant using a DHFR amplification system (JP 2-257891 A) or the like.

[0321] In the manner as mentioned above, by generating and accumulating the DcR3 variant according to the present invention in a culture, and collecting from the culture, it is possible to produce the DcR3 variant according to the present invention.

[0322] In order to isolate and purify the peptide produced by the transformant, it is possible to use a usual protein isolation and purification method.

[0323] For example, when the DcR3 variant of the present invention is extracellularly secreted, the DcR3 variant can be collected from the culture supernatant. In other words, the culture is subjected to a method such as centrifugation to obtain a culture supernatant, and from the culture supernatant, a usual protein isolation and purification method, namely, a method such as a solvent extraction method, a salting-out method with ammonium sulfate or the like, a desalting method, a precipitation method with an organic solvent, an anion exchange chromatography method using a resin such as diethylaminoethyl (DEAE)-Sepharose or DIAION HPA-75 (Mitsubishi Chemical Corporation), a cation exchange chromatography method using a resin such as S-Sepharose FF (GE Healthcare), a hydrophobic chromatography method using a resin such as Butyl Sepharose or Phenyl Sepharose, a gel filtration method using a molecular sieve, an affinity chromatography method, a chromatofocusing method, or an electrophoresis method such as an isoelectric focusing is used alone or in combination, thereby it is possible to obtain a purified product.

[0324] For example, when the DcR3 variant of the present invention has Fc of an immunoglobulin that can bind to Protein G or Protein A, a Protein G chromatography method or a Protein A chromatography method in which Protein G or Protein A is bound to a carrier as an affinity ligand can be used as an affinity chromatography method [Monoclonal Antibodies-Principles and practice, Third edition, Academic Press (1996), Antibodies-A Laboratory Manual, Cold Spring Harbor Laboratory (1988)]. It is also possible to combine methods used for protein purification such as gel filtration, ion exchange chromatography and ultrafiltration.

[0325] From the DcR3 variant that could be obtained by the abovementioned method, by using a conventional chemical modification method, it is also possible to obtain a DcR3 variant in which a peptide, a glycan or PEG or the like is further chemically modified.

### 6. Method for Evaluating Biological Activity, Physical Property and Kinetics of DcR3 Variant

[0326] Examples of the DcR3 variant of the present invention preferably include a DcR3 variant having neutralizing activity to at least one or more of LIGHT, TL1A and FasL, a DcR3 variant having neutralizing activity to all of LIGHT, TL1A and FasL, a DcR3 variant having no neutralizing activity to FasL and having neutralizing activity to one of LIGHT and TL1A, a DcR3 variant having no neutralizing activity to FasL and having neutralizing activity to both of LIGHT and TL1A, or the like.

[0327] It is possible to measure the biological activity such as neutralizing activity, the physical property and the in vivo kinetics of the DcR3 variant of the present invention by using the following methods.

### (1) Preparation of Ligand

[0328] The origin of LIGHT, TL1A and FasL used in the present invention is not limited, but LIGHT, TL1A and FasL derived from eukaryotes are exemplified. Examples of LIGHT, TL1A and FasL derived from eukaryotes include LIGHT, TL1A and FasL derived from yeasts, insects or mammals. Preferably examples thereof include LIGHT, TL1A and FasL derived from primates including humans, or rodents including mice or the like.

[0329] LIGHT, TL1A or FasL or a cell expressing the ligand can be obtained by introducing an expression vector including a cDNA encoding the full length or partial length of LIGHT, TL1A or FasL into an appropriate host cell such as Escherichia co/i, a yeast, an insect cell or an animal cell or the like. It can also be obtained by purifying the ligand from various human cultured cells or human tissues or the like expressing a large amount of LIGHT, TL1A or FasL. The cultured cell or the tissue can also be used as a ligand as it is. Furthermore, it is also possible to prepare a synthetic peptide having a partial sequence of LIGHT, TL1A or FasL by a chemical synthesis method such as the Fmoc method or the tBoc method.

[0330] LIGHT, TL1A and FasL can be produced by using the method mentioned in Molecular Cloning, A Laboratory Manual, Second Edition, Cold Spring Harbor Laboratory Press (1989) or the like and introducing a DNA encoding LIGHT, TL1A or FasL into a host cell to express by, for example, the following method.

[0331] Soluble LIGHT, TL1A and FasL are generated by being expressed on the cell membrane as membrane-bound LIGHT, membrane-bound TL1A and membrane-bound FasL, respectively, followed by shedding of the extracellular region by protease. Although a cleavage site has been identified for each ligand, when a recombinant of a soluble ligand is produced, any sequence in the vicinity of the cleavage site can be included. For example, a soluble LIGHT recombinant can be produced from a region at positions 66 to 240, a region at positions 74 to 240, a region at positions 83 to 240 or the like from the N-terminus in the amino acid sequence of membrane-bound LIGHT. A soluble TL1A recombinant can be produced from a region at positions 72 to 251 or the like from the N-terminus in the amino acid sequence of membrane-bound TL1A. A soluble FasL recombinant can be produced from a region at positions 130 to 281, a region at positions 134 to 281 or the like from the N-terminus in the amino acid sequence of membrane-bound FasL.

[0332] A recombinant of a soluble ligand can be produced by adding a His tag or a FLAG tag or the like to the N-terminus of the abovementioned region, and obtained by affinity purification. Examples of the amino acid sequences of the soluble recombinants of LIGHT, TL1A and FasL include amino acid sequences set forth in SEQ ID NO: 114, 116, 118, 120, 122, 124, 126, 128, 130 and 306. Examples of the nucleotide sequences of the DNAs encoding the amino acid sequences of the soluble recombinants of LIGHT, TL1A and FasL include nucleotide sequences set forth in SEQ ID NO: 113, 115, 117, 119, 121, 123, 125, 127, 129 and 305.

[0333] Functional LIGHT, TL1A or FasL can form a homotrimer. Soluble LIGHT, TL1A or FasL prepared by any of the abovementioned methods is analyzed by SEC-MALS, and the molecular weight can be calculated. SEC-MALS is an analysis method for calculating a molecular weight for each peak detected at a wavelength of 215 nm separated by size exclusion chromatography (SEC)-HPLC, using a maximum value of scattering intensity detected with multi angle light scattering (MALS). Examples of the HPLC system include Prominence manufactured by Shimadzu Corporation; examples of the SEC column include TSKgel manufactured by Tosoh Corporation; and examples of the MALS detector include miniDAWN TREOS manufactured by Wyatt Technology Corporation or the like. Examples of the method for isolating a homotrimer from a crude purified product that forms those other than trimers include SEC purification or the like. Examples of the SEC purification method include a method in which a crude purified product is fractionated according to the molecular weight size using AKTApurifier manufactured by GE Healthcare as an HPLC system and Superdex 200 Increase 10/300 GL manufactured by GE Healthcare as a SEC column, and only a molecular weight fraction of a homotrimer is collected, or the like.

### (2) Evaluation of Binding Activity of DcR3 Variant Including Human Fc Region

[0334] Examples of the method for measuring the binding activity of the DcR3 variant to soluble LIGHT, soluble TL1A or soluble FasL include a binding assay by enzyme-linked immunosorbent assay (ELISA), a kinetics analysis by Biacore or the like. As the ligand, a transgenic cell or a recombinant protein obtained by introducing an expression vector including a DNA sequence encoding an extracellular domain of each ligand of LIGHT, TL1A or FasL into Escherichia coli, a yeast, an insect cell or an animal cell or the like, and serum, plasma or a culture supernatant or the like including a ligand obtained from a human tissue or a human cell are used.

[0335] In the case of ELISA, for example, an anti-human IgG antibody is immobilized to a 96 well plate or the like, and the DcR3 variant is reacted, and then each ligand is dispensed to bind. After washing, an unlabeled anti-ligand antibody or a receptor-Fc fusion of each ligand or the like is reacted, and then an anti-Fc antibody or the like labeled with biotin, an enzyme or a chemiluminescence substance or the like is reacted, or a labeled anti-ligand antibody or a receptor-Fc fusion of each ligand or the like is reacted, followed by detection according to the labeled substance, thereby it is possible to measure the binding of the DcR3 variant to a ligand. In the case of Biacore, for example, using Biacore T100 or Biacore T200, kinetics in the binding between each ligand and the DcR3 variant is measured, and the results are analyzed with analysis software included with the apparatus. Specifically, after an anti-human IgG antibody is immobilized on a sensor chip CM5 by an amine coupling method, the DcR3 variant is injected and an appropriate amount is bound on the sensor chip, and further a plurality of ligands having known concentrations are injected, thereby binding and dissociation are measured. For the data thus obtained, a kinetics analysis is performed with a 1:1 binding model using software included with the apparatus, and various parameters are obtained. Alternatively, after each ligand is immobilized on a sensor chip by, for example, an amine coupling method, a plurality of DcR3 variants having known concentrations are injected, thereby binding and dissociation are measured. For the data thus obtained, a kinetics analysis is performed with a bivalent binding model using software included with the apparatus, and various parameters are obtained. Alternatively, to sensor chip Protein A obtained by immobilizing a MabSelect Sure ligand, which is an IgG binding domain variant protein of Protein A, on a sensor chip, the DcR3 variant is injected and an appropriate amount is bound on the sensor chip, and further a plurality of ligands having known concentrations are injected, thereby binding and dissociation are measured. For the data thus obtained, a kinetics analysis is performed with a 1:1 binding model using software included with the apparatus, and various parameters are obtained.

[0336] The binding activity of the DcR3 variant to membrane-bound LIGHT, membrane-bound TL1A or membrane-bound FasL can be measured by flow cytometry, for example, using a transgenic cell obtained by introducing an expression vector including a DNA sequence encoding the full length of each ligand of LIGHT, TL1A and FasL into an animal cell or the like, or a cell such as PBMC or HUVEC stimulated for induction of expression of the membrane-bound ligand by adding appropriate stimulation such as stimulation with a mitogen such as PHA-L, PMA or ionomycin or anti-CD3 antibody and anti-CD28 antibody stimulation, cytokine, IgG or immune complex stimulation. Specifically, measurement can be performed by reacting the DcR3 variant with a cell expressing a membrane-bound ligand, followed by reaction with a fluorescently labeled anti-Fc antibody or the like, or reacting the DcR3 variant labeled with biotin or a fluorescent dye or the like, and after washing, detecting the fluorescence intensity according to the labeled substance using a flow cytometer.

[0337] Examples of the DcR3 variant of the present invention measured by the abovementioned method include a DcR3 variant having binding activity to at least one or more of LIGHT, TL1A and FasL, a DcR3 variant having binding activity to all of LIGHT, TL1A and FasL, a DcR3 variant having no binding activity to FasL and having binding activity to one of LIGHT and TL1A, or a DcR3 variant having no binding activity to FasL and having binding activity to both of LIGHT and TL1A.

### (3) Evaluation of Neutralizing Activity of DcR3 Variant

[0338] Examples of the method for measuring the neutralizing activity of the DcR3 variant include a method for measuring the binding of LIGHT, TL1A or FasL with a corresponding receptor in a solution supplemented with the DcR3 variant, or a method for measuring cell functions such as cytokine production or cell proliferation by adding a corresponding ligand to a cell expressing a receptor of LIGHT, TL1A or FasL in a medium supplemented with the DcR3 variant.

[0339] The inhibitory activity to the binding of human LIGHT with a corresponding receptor can be measured by the following method using, for example, the method mentioned in U.S. Pat. No. 8,974,787 B2 or the like. Measurement is performed by, in a reaction solution supplemented with the DcR3 variant, reacting HVEM or LTβR labeled with biotin, a fluorescent dye or the like with a cell expressing membrane-bound LIGHT, and after washing, detecting the fluorescence intensity according to the labeled substance using a flow cytometer. Alternatively, measurement is performed by, in a reaction solution supplemented with the DcR3 variant, reacting LIGHT labeled with biotin, a fluorescent dye or the like with a cell expressing HVEM or LTβR, and after washing, detecting the fluorescence intensity according to the labeled substance using a flow cytometer. The inhibitory activity of the DcR3 variant to the binding of LIGHT with a corresponding receptor is confirmed by a decrease in the fluorescence intensity in comparison with the case where no DcR3 variant is added.

[0340] Using the same method as mentioned above, it is also possible to measure the inhibitory activity to the binding of TL1A or FasL with a corresponding receptor.

[0341] As the DcR3 variant of the present invention, preferred is a DcR3 variant having inhibitory activity to at least one or more of the bindings of LIGHT, TL1A and FasL with corresponding receptors, a DcR3 variant having inhibitory activity to all of the bindings of LIGHT, TL1A and FasL with corresponding receptors, a DcR3 variant having no inhibitory activity to the binding of FasL with a corresponding receptor and having inhibitory activity to one of the bindings of LIGHT and TL1A with corresponding receptors, or a DcR3 variant having no inhibitory activity to the binding of FasL with a corresponding receptor and having inhibitory activity to the bindings of LIGHT and TL1A with corresponding receptors. In the present invention, the expression of “having no inhibitory activity to the binding of a ligand with a corresponding receptor” is used as a meaning including the case where the inhibitory activity is significantly lowered than that of wild-type DcR3.

[0342] The inhibitory activity to a cell function initiated by addition of LIGHT can be measured as follows using, for example, the method mentioned in U.S. Pat. No. 8,974,787 B2 or the like. In a medium supplemented with the DcR3 variant, using a cell such as HT-29 (ATCC Number: HTB-38) which was confirmed to express HVEM or LTβR corresponding to a LIGHT receptor, LIGHT-dependent production of chemokine such as IL-8, CCLS or CCL20 is measured by the ELISA method, alphaLISA (PerkinElmer, Inc.) or CBA assay (BD Biosciences) or the like using a culture supernatant. Alternatively, using a cell such as an intestinal myofibroblast (Lonza K. K.) stimulated with IFN-γ, soluble or membrane-bound LIGHT-dependent production of a chemokine such as CXCL-10 is also measured using the same method. Alternatively, using, instead of soluble or membrane-bound LIGHT, LIGHT whose expression was induced from PBMC or a T cell stimulated with an anti-CD3 antibody and an anti-CD28 antibody or PMA and ionomycin or the like, measurement can be performed using the same method. The inhibitory activity of the DcR3 variant to a cell function initiated by addition of soluble or membrane-bound LIGHT is confirmed by a decrease in the production amount of the chemokine in comparison with the case where no DcR3 variant is added. Using, for example, the method mentioned in U.S. Pat. No. 8,974,787 B2 or the like, it is possible to evaluate in vivo the improvement in survival, body weight, a pathological condition, pathology, engraftment of a human cell or the like by administration of the DcR3 variant in an acute graft versus host disease (GVHD) model in which allogeneic transplantation of human PBMC was performed to an immunodeficient mouse.

[0343] The inhibitory activity to a cell function initiated by addition of TL1A can be measured as follows using, for example, the method mentioned in Mucosal Immunology, 2015, 8: p.545-558 or the like. In a medium supplemented with the DcR3 variant, using blood, PBMC, a pan T cell, a CD4-positive T cell or a memory CD4-positive T cell or the like derived from primates such as humans or rodents such as mice, the cell is stimulated with each cytokine cocktail of IL-12, IL-18 and TL1A, or IL-12, IL-18, IL-15 and TL1A, and TL1A-dependent production of a cytokine such as IFN-γ, IL-6, GM-CSF, TNF-α, IL-5, IL-13, IL-17 or IL-22 or the like is measured by the ELISA method, alphaLISA or CBA assay or the like using a culture supernatant. Alternatively, using, for example, the method mentioned in Immunity, 2002, 16: p.479-492, in a medium supplemented with the DcR3 variant, a pan T cell, a CD4-positive T cell or a memory CD4-positive T cell or the like derived from primates such as humans or rodents such as mice is stimulated with an anti-CD3 antibody and an anti-CD28 antibody, and TL1A-dependent production of IFN-γ and IL-2 is measured by the same method as mentioned above. Alternatively, using a cell line forcedly expressing membrane-bound TL1A instead of soluble TL1A, measurement can also be performed by the same method. Alternatively, using TL1A whose expression was induced from PBMC or a monocyte stimulated with IgG or an immune complex or the like, measurement can also be performed by the same method. The inhibitory activity of the DcR3 variant to a cell function initiated by addition of TL1A is confirmed by a decrease in the cytokine or inhibition of cell proliferation in comparison with the case where no DcR3 variant is added. Furthermore, it is possible to evaluate in vivo the improvement in survival, body weight, a pathological condition and pathology and the like by administration of the DcR3 variant in, for example, the 2,4,6-trinitrobenzenesulfonic acid (TNBS)-induced colitis model mentioned in Mucosal Immunology, 2011, 4: p.172-185 or the dextran sodium sulfate (DSS)-induced colitis model mentioned in Mucosal Immunology, 2014, 7: p.1492-1503. In addition, it is possible to evaluate the effect on improving a pathological condition in a TL1A-dependent inflammation, allergic disease or autoimmune disease model in rodents such as mice.

[0344] The inhibitory activity to a cell function initiated by addition of FasL can be measured as follows using, for example, the method mentioned in J. Rheumatol., 2013, 40: p.1316-1326 or the like. In a medium supplemented with the DcR3 variant, using Jurkat cells (DSMZ Number: ACC 282), apoptosis dependent on soluble FasL or soluble FasL cross-linked with an antibody is measured by Annexin V/Propium Iodide staining or BrdU uptake or ATP amount of a viable cell or the like. Alternatively, using a cell line forcedly expressing membrane-bound FasL instead of soluble FasL, measurement can also be performed by the same method. Alternatively, using FasL induced from PBMC or a T cell stimulated, measurement can also be performed by the same method. The inhibitory activity of the DcR3 variant to a cell function initiated by addition of FasL is confirmed by a decrease in the apoptosis in comparison with the case in which no DcR3 variant is added.

[0345] Examples of the DcR3 variant of the present invention measured by the abovementioned method include a DcR3 variant having inhibitory activity to at least one or more of cell functions initiated by addition of LIGHT, TL1A and FasL, a DcR3 variant having inhibitory activity to all of cell functions initiated by addition of LIGHT, TL1A and FasL, a DcR3 variant having no inhibitory activity to a cell function initiated by addition of FasL and having inhibitory activity to one or more of cell functions initiated by addition of LIGHT and TL1A, or a DcR3 variant having no inhibitory activity to a cell function initiated by addition of FasL and having inhibitory activity to cell functions initiated by addition of LIGHT and TL1A. In the present invention, the expression of “having no inhibitory activity to a cell function initiated by addition of a ligand” is used as a meaning including the case where the inhibitory activity is significantly lowered than that of wild-type DcR3.

### (4) Evaluation of OPG Ligand Reactivity of DcR3 Variant

[0346] One characteristic of the DcR3 variant of the present invention is that any of parts of or all of CRD1, CRD4 and CRD3 not involved in ligand binding are sequences derived from OPG.

[0347] The fact that the DcR3 variant having no binding activity to RANKL and TRAIL, which are OPG ligands, can be evaluated by, for example, the same method as the method for measuring the binding activity to LIGHT, TL1A and FasL mentioned above or the like.

[0348] One characteristic of the DcR3 variant of the present invention is having no neutralizing activity also to RANKL and TRAIL.

[0349] The neutralizing activity of the DcR3 variant to RANKL can be evaluated using, for example, tartrate-resistant acid phosphatase (TRAP) activity measurement, which is a differentiation assay of an osteoclast precursor by RANKL stimulation, mentioned in J. Immunol., 2012, 189: p.245-252 or the like.

[0350] Regarding the neutralizing activity of the DcR3 variant to TRAIL, for example, apoptosis induction by soluble TRAIL or cross-linked soluble TRAIL in a human cancer cell line expressing DR4 or DR5 can be evaluated by the same method as the method for measuring the neutralizing activity to FasL mentioned above or the like.

### (5) Evaluation of Kinetics of DcR3 Variant

[0351] As the DcR3 variant of the present invention, a DcR3 variant in which the binding to heparan sulfate included in heparan sulfate proteoglycan (HSPG) on the cell membrane has been lowered or eliminated is preferable, and a DcR3 variant having no heparan sulfate-binding domain (HBD) is more preferable.

[0352] The presence or absence of the binding to heparan sulfate on the cell membrane via HBD can be measured as follows using, for example, the method mentioned in J. Immunol., 2006, 176: p.173-180 or the like. Measurement can be performed by reacting wild-type DcR3 or the DcR3 variant with any cell, for example, a CHO cell or a cell of a human cell line, a vascular endothelial cell, a hepatocyte or a blood cell or the like, followed by reaction with a fluorescently labeled detection antibody or the like, or reacting wild-type DcR3 or the DcR3 variant labeled with biotin or a fluorescent dye or the like, and after washing, detecting the fluorescence intensity according to the labeled substance using a flow cytometer (FCM). Lowering or elimination of the binding to the cell membrane due to deficiency of HBD of DcR3 can be examined by a decrease in the fluorescence intensity by FCM.

[0353] Examples of the method for evaluating whether the abovementioned binding on the cell membrane is a binding via HBD of DcR3 or not include a method in which GAG such as heparin, heparan sulfate or the like as an inhibitor is added during a reaction of wild-type DcR3 or the DcR3 variant, or a cell is treated with an enzyme such as heparinase or trypsin or the like in advance, and then the wild-type DcR3 or the DcR3 variant is reacted, using, for example, the method mentioned in J. Immunol., 2006, 176: p.173-180 or the like.

[0354] One characteristic of the DcR3 variant of the present invention is that in vivo kinetics is improved compared to that of wild-type DcR3 since elimination via heparan sulfate is relieved in vivo. In the present invention, “in vivo kinetics is improved” means that the half-life in blood is longer compared to that of wild-type DcR3 or the value of the area under the concentration-time curve (AUC) to infinity is higher compared to that of wild-type DcR3.

[0355] As a target for comparison, it is also possible to use a molecule including CRD of wild-type DcR3 instead of wild-type DcR3. Specific examples thereof include DcR3 FL-Fc (amino acid sequence: SEQ ID NO: 100, nucleotide sequence of DNA: SEQ ID NO: 99), DcR3 FL-FLAG (amino acid sequence: SEQ ID NO: 104, nucleotide sequence of DNA: SEQ ID NO: 103), S195-Fc obtained by fusing CRD of wild-type DcR3 and Fc to each other (amino acid sequence: SEQ ID NO: 102, nucleotide sequence of DNA: SEQ ID NO: 101), and R128Q-Fc obtained by fusing Fc to the C-terminus of full-length DcR3 having one amino acid mutation in HBD (amino acid sequence: SEQ ID NO: 112, nucleotide sequence of DNA: SEQ ID NO: 111) [U.S. Pat. No. 6,835,814 B1, US 6,965,01 B1] and the like. When a molecule including CRD of these wild-type DcR3 as a target for comparison, it is also referred to as wild-type DcR3 control.

[0356] The time course of blood concentration of the DcR3 variant in rodents such as mice or non-human primates such as cynomolgus monkeys can be measured by intravenously or subcutaneously administering an appropriately-selected dose, collecting blood at an appropriately-selected time, and using a detection system of DcR3 or human Fc. Kinetic parameters such as half-life in blood and AUC can be calculated by using a method such as a moment analysis from the time course of blood concentration using, for example, the method mentioned in Xenobiotic Metabolism and Disposition, 1999, 14: p.286-293.

[0357] Since it has been known that in vivo kinetics is improved if many sialic acids are added to the terminus of an N-linked glycan (J. Pharm. Sci., 2015, 104: p.1866-1884), it is preferable that the DcR3 variant of the present invention having an N-linked glycan also has many sialic acids added. The number of additions of sialic acids per protein molecule can be calculated by, for example, separating sialic acids labeled using a reagent kit for fluorescent labeling of sialic acid (Takara Bio Inc.) or the like by reversed-phase HPLC, and comparing with a standard curve of sialic acid.

### (6) Evaluation of Physical Property of DcR3 Variant

[0358] One characteristic of the DcR3 variant of the present invention is that, when expressed in mammalian cells, isolated or purified, the content of aggregates is lower than that of wild-type DcR3.

[0359] Whether aggregates are generated during protein expression and/or secretion can be determined by, for example, collecting host cells into which a recombinant vector carrying the DcR3 variant have been introduced and/or a culture supernatant, and examining an approximate molecular weight under non-reducing conditions by immunoblotting using an anti-DcR3 antibody, or, in the case of an Fc fusion or a tag adduct such as His or FLAG, an antibody against it. When proteins are aggregated during protein expression and/or secretion, one or a plurality of band(s) of a larger size than the expected molecular weight is/are detected.

[0360] A method for calculating the molecular weight of a protein from the amino acid sequence is exemplified. When a more accurate molecular weight is calculated, an analysis method by SEC-MALS is exemplified. Regarding each peak detected at a wavelength of 215 nm separated by size exclusion chromatography (SEC)-HPLC, the molecular weight can be calculated using a maximum value of scattering intensity detected with multi angle light scattering (MALS). Examples of the HPLC system include Prominence manufactured by Shimadzu Corporation; examples of the SEC column include TSKgel manufactured by Tosoh Corporation; and examples of the MALS detector include miniDAWN TREOS manufactured by Wyatt Technology Corporation or the like.

[0361] Whether isolated or purified proteins are aggregated or not can be examined by subjecting the proteins to SDS-PAGE under non-reducing conditions, followed by detection by CBB staining or the like, or by immunoblotting using the same method as mentioned above. Regarding the content of aggregates, the proportion of each peak can be calculated from the area of each peak detected at a wavelength of 215 nm separated by gel filtration chromatography (SEC) using HPLC. Examples of the SEC column include TSKgel G3000SW manufactured by Tosoh Corporation or ACQUITY UPLC Protein BEH SEC manufactured by Waters K. K. or the like. When analysis is performed using the method mentioned above, a preferable content of aggregates is 0 to 60%, a more preferable content of aggregates is 0 to 40%, a still more preferable content of aggregates is 0 to 30%, a yet more preferable content of aggregates is 0 to 20%, and most preferable content of aggregates is 0 to 10%.

[0362] The DcR3 variant of the present invention is characterized by having lower hydrophobicity than that of wild-type DcR3. The hydrophobicity of a protein can be measured using a hydrophobic interaction chromatography (HIC) column that interacts with a hydrophobic region existing on the surface of the protein. Examples of the HIC column include TSKgel Butyl-NPR manufactured by Tosoh Corporation or the like.

[0363] The DcR3 variant of the present invention is characterized by having more improved thermostability than that of wild-type DcR3. Examples of the method for measuring the thermostability of a protein include calorimetry such as differential scanning calorimetry (DSC); spectroscopy that obtains an intrinsic fluorescence spectrum or a circular dichroism (CD) spectrum during thermal denaturation or chemical denaturation; differential scanning fluorimetry (DSF) that detects exposure of a hydrophobic region existing in the inside of a protein associated with a rise in temperature using a fluorescent dye (Sypro Orange or the like); or the like [3 Am Chem Soc, 2009, 131: p.3794-3795].

[0364] Regarding DSF that evaluates the thermostability of a protein, it is possible to measure the fluorescence amount at each temperature using, for example, the method mentioned in J. Pharm. Sci., 2013, 102: p.2471-2483 or the like. It is possible to calculate the thermal unfolding transition midpoints (Tm) value by drawing a melting curve using software such as CFX manager manufactured by Bio-Rad Laboratories, Inc. Similarly, regarding DSC that evaluates the thermostability of a protein, it is possible to calculate the heat capacity and the Tm value at each temperature using, for example, the method mentioned in J. Pharm. Sci., 2012, 101: p.955-964 or the like.

### 7. DcR3 Variant Composition

[0365] Examples of the DcR3 variant composition of the present invention include a composition including a DcR3 variant molecule(s). Examples of the DcR3 variant composition of the present invention include a composition including a plurality of DcR3 variant molecules that consist of equivalent primary amino acid sequences and can occur by posttranslational modification such as oxidation/reduction reaction, glycosylation reaction or sulfation addition reaction in the amino acid sequence. The DcR3 variant of the present invention may include, for example, a DcR3 variant having one or more complex N-glycoside-linked glycans, and a DcR3 variant not having a complex N-glycoside-linked glycan. The proportion of the DcR3 variants having one or more complex N-glycoside-linked glycans is, for example, preferably 70 to 100%, more preferably 90 to 99%, and particularly preferably 95 to 98%, relative to the total number of the DcR3 variants of the present invention.

### 8. Pharmaceutical Composition Including DcR3 Variant

[0366] One embodiment of the present invention is a composition including an effective dose of the DcR3 variant of the present invention. The composition including the DcR3 variant of the present invention can be used as an active ingredient of a prophylactic or therapeutic agent for an autoimmune disease, an inflammatory disease or an allergic disease, including a mucosal disease. In other words, it is possible to prevent or treat an autoimmune disease, an inflammatory disease or an allergic disease by administering the pharmaceutical composition including the DcR3 variant of the present invention to a patient in need of prevention or treatment of an autoimmune disease, an inflammatory disease or an allergic disease.

[0367] Examples of the pathological condition or the disease for which the composition of the present invention is used include, but are not limited to, an inflammatory disease, an autoimmune disease or an allergic disease or the like, such as inflammatory bowel disease (IBD), systemic lupus erythematosus, psoriasis, chronic graft versus host disease, acute graft versus host disease, Crohn's disease, ulcerative colitis, inflammatory bowel disease, multiple sclerosis, celiac disease, idiopathic thrombotic thrombocytopenic purpura, myasthenia gravis, Sjogren's syndrome, scleroderma, asthma, uveitis, epidermal hyperplasia, alopecia areata, Behcet's disease, Takayasu's arteritis, cartilaginous inflammation, bone degradation, arthritis, juvenile arthritis, juvenile rheumatoid arthritis, pauciarticular juvenile rheumatoid arthritis, polyarticular juvenile rheumatoid arthritis, systemic onset juvenile rheumatoid arthritis, juvenile ankylosing spondylitis, juvenile enteropathic arthritis, juvenile reactive arthritis, juvenile Reiter's syndrome, seronegative enthesopathy and arthropathy syndrome (SEA syndrome), juvenile dermatomyositis, juvenile psoriatic arthritis, juvenile scleroderma, juvenile systemic lupus erythematosus, juvenile vasculitis, pauciarticular rheumatoid arthritis, polyarticular rheumatoid arthritis, systemic onset rheumatoid arthritis, ankylosing spondylitis, enteropathic arthritis, reactive arthritis, Reiter's syndrome, dermatomyositis, psoriatic arthritis, vasculitis, myositis, polymyositis, dermatomyositis, osteoarthritis, polyarteritis nodosa, Wegener's granulomatosis, arteritis, polymyalgia rheumatica, sarcoidosis, sclerosis, primary biliary cirrhosis, sclerosing cholangitis, dermatitis, atopic dermatitis, atherosclerosis, Still's disease, chronic obstructive pulmonary disease, Guillain-Barre syndrome, type 1 diabetes mellitus, Graves' disease, Addison's disease, Raynaud's phenomenon, autoimmune hepatitis or Wiskott-Aldrich syndrome or the like.

[0368] The pharmaceutical composition containing the DcR3 variant of the present invention can contain, as an active ingredient, the DcR3 variant or a mixture of the DcR3 variant with any other active ingredients for treatment. These pharmaceutical formulations are produced by any method well known in the technical field of pharmaceutics by mixing an active ingredient with one or more pharmacologically acceptable carriers.

[0369] The content of the DcR3 variant of the present invention in the pharmaceutical composition varies depending on the dosage form, the pharmacologically acceptable dose of the DcR3 variant of the present invention or the like, and the content is, for example, about 0.01 to 100% by weight. The content of the pharmacologically acceptable carrier in the pharmaceutical formulation varies depending on the dosage form, the pharmacologically acceptable dose of the DcR3 variant of the present invention or the like, and the content is, for example, 0 to 99.9% by weight.

[0370] Regarding the route of administration, it is desirable to use the most effective one for treatment, and examples thereof include oral administration, or parenteral administration such as intravenous, subcutaneous, intraoral, intratracheal, intrarectal, intramuscular or intraperitoneal administration.

[0371] The administration form includes tablets, powders, granules, syrups or injections or the like.

[0372] As an appropriate formulation for oral administration, for example, a liquid preparation such as a syrup can be produced using water; saccharides such as sucrose, sorbit or fructose; glycols such as polyethylene glycol or propylene glycol; oils such as sesame oil, olive oil or soybean oil; preservatives such as p-hydroxybenzoic acid esters; flavors such as strawberry flavor or peppermint; or the like. A tablet, a powder and a granule and the like can be produced using excipients such as lactose, glucose, sucrose or mannit; disintegrators such as starch or sodium alginate; lubricants such as magnesium stearate or talc; binders such as polyvinyl alcohol, hydroxypropyl cellulose or gelatin; surfactants such as fatty acid ester; plasticizers such as glycerin; or the like.

[0373] An appropriate formulation for parenteral administration preferably consists of a sterilized aqueous agent containing an active compound isotonic with blood of a recipient. For example, in the case of an injection, a solution for injection is prepared using a carrier consisting of a mixture of a salt solution, a glucose solution or a salt water with a glucose solution, or the like.

[0374] In these parenteral agents, it is also possible to add one or more auxiliary ingredients selected from the diluents, preservatives, flavors, excipients, disintegrators, lubricants, binders, surfactants and plasticizers and the like exemplified in the oral agents.

[0375] A medicament containing the DcR3 variant of the present invention can be safely administered to mammals (e.g., humans, mice, rats, rabbits, dogs, cats, cattle, horses, pigs or monkeys or the like).

[0376] The dose and the frequency of administration of the DcR3 variant of the present invention vary depending on administration form, age of a patient, body weight, disease, or nature or seriousness of symptoms to be treated, but usually in the case of oral administration, 0.01 mg to 1 g, and preferably 0.05 to 50 mg per adult are administered once or several times daily. In the case of parenteral administration such as intravenous administration, 0.001 to 100 mg, and preferably 0.01 to 10 mg per adult are administered once or several times daily. However, these dose and frequency of administration vary depending on the various conditions mentioned above.

### EXAMPLES

[0377] Examples of the present invention will be described below. However, the present invention is not limited to these Examples.

### [Example 1] Evaluation of Aggregability of Wild-Type DcR3 in Mammalian Cell

[0378] A fusion protein (DcR3 FL-Fc) (FIG. 3A, SEQ ID NO: 100) of wild-type DcR3 (also referred to as full-length DcR3) (SEQ ID NO: 4), a linker sequence IEGRMD (SEQ ID NO: 106) and a human IgG1 Fc region (g1S) (SEQ ID NO: 72), a fusion protein (S195-Fc) (FIG. 3B, SEQ ID NO: 102) of human DcR3 lacking an HBD region (SEQ ID NO: 108), a linker sequence IEGRMD (SEQ ID NO: 106) and a human IgG1 Fc region (SEQ ID NO: 72), and a protein (DcR3 FL-FLAG) (SEQ ID NO: 104) obtained by adding a FLAG tag (SEQ ID NO: 110) to full-length DcR3 (SEQ ID NO: 4) were produced as follows.

[0379] Regarding DcR3 FL-Fc, a DNA fragment of a signal peptide sequence, a DNA fragment (SEQ ID NO: 3) of human DcR3, a DNA fragment (SEQ ID NO: 105) of a linker sequence IEGRMD, and a DNA fragment (SEQ ID NO: 71) of Fc (g1S) were artificially synthesized (GENEWIZ, Inc. or Sigma-Aldrich Co. LLC), followed by insertion using In-Fusion HD Cloning Kit (Clontech Laboratories, Inc.) into a pClpuro vector (pCI manufactured by Promega Corporation was partially modified) digested with restriction enzymes Nhel and Sall (New England Biolabs, Inc.), and Escherichia co/i DH5a competent cells (TOYOBO CO., LTD.) were transformed, thus obtaining transformants each including a DcR3 FL-Fc DNA fragment (SEQ ID NO: 99) introduced thereinto. Similarly, regarding 5195-Fc, a DNA fragment of a signal peptide sequence, a DNA fragment (SEQ ID NO: 107) of human DcR3 lacking HBD, a DNA fragment (SEQ ID NO: 105) of a linker sequence IEGRMD, and a DNA fragment (SEQ ID NO: 71) of Fc (g1S) were artificially synthesized, thus obtaining transformants each including an 5195-Fc DNA fragment (SEQ ID NO: 101) introduced thereinto. Regarding DcR3 FL-FLAG, a DNA fragment of a signal peptide sequence, a DNA fragment (SEQ ID NO: 3) of human DcR3, and a DNA fragment (SEQ ID NO: 109) of a FLAG tag were artificially synthesized, thus obtaining transformants each including a DcR3 FL-FLAG DNA fragment (SEQ ID NO: 103) introduced thereinto.

[0380] Each plasmid obtained from each transformant was introduced into host cells selected from Freestyle CHO—S cells, Freestyle 293F cells and Expi293 cells (all of which are manufactured by Thermo Scientific) to transiently express proteins. For plasmid introduction, Freestyle MAX Reagent, 293Fectin Transfection Reagent or ExpiFectamine 293 (all of which are manufactured by Thermo Scientific) was used.

[0381] After the transfected cells were cultured for several days, the culture supernatants were collected, and DcR3 FL-Fc and S195-Fc were subjected to affinity purification using MabSelect SuRe (GE Healthcare), and DcR3 FL-FLAG was subjected to affinity purification using Anti-FLAG M2 affinity gel (Sigma-Aldrich Co. LLC). The culture supernatants for DcR3 FL-Fc and 5195-Fc were passed through a column filled with a resin, washed with PBS (Nacalai Tesque, Inc.), and eluted with an elution buffer (20 mM citric acid, 50 mM NaCl, pH 3.4), followed by rapid neutralization with a neutralization buffer (1M sodium phosphate, pH 7.0). The culture supernatant for DcR3 FL-FLAG was similarly charged into a resin, washed with PBS, and eluted with an elution buffer (100 mM glycine-HCl, pH 3.5), followed by rapid neutralization with a neutralization buffer (1M Tris-HCl, pH 8.0). The absorbance at 280 nm (A280) of each elution fraction was measured, and consecutive fractions having high measurement values were collected. The buffer of the collected fractions was substituted with PBS using a NAP column (GE Healthcare) and passed through a 0.22 μm filter, and the resultant product was regarded as a purified protein. The concentrations of the purified proteins were calculated by using the extinction coefficient of DcR3 FL-Fc, S195-Fc and DcR3 FL-FLAG at 280 nm as 1.03, 1.17 and 0.77, respectively, and after SDS-PAGE under non-reducing conditions and 100 mM DTT reducing conditions, the gel was subjected to Coomassie staining (Nacalai Tesque, Inc.), and the molecular weights were confirmed. The estimated molecular weights of monomers of DcR3 FL-Fc, S195-Fc and DcR3 FL-FLAG, predicted from the amino acid sequences thereof, are about 56.4 kDa, 44.7 kDa and 31.0 kDa, respectively. Under non-reducing conditions, DcR3 FL-Fc and S195-Fc, which are Fc fusions, exist as dimers, and thus the estimated molecular weights are about 112.8 kDa and 89.4 kDa, respectively.

[0382] As a result of SDS-PAGE of DcR3 FL-Fc, S195-Fc and DcR3 FL-FLAG that were transiently expressed in mammalian cells under non-reducing conditions, the majorities of the samples of DcR3 FL-Fc, S195-Fc and DcR3 FL-FLAG remained in sample wells, and the electrophoresed parts of the samples resulted in smear-like or ladder-like patterns, revealing that all recombinants were highly aggregated (FIG. 1A).

[0383] Furthermore, regarding commercially available full-length DcR3-Fc (Abcam plc.) produced using HEK293 cells as host cells, immunoblotting under non-reducing conditions was performed using a rabbit anti-human IgG Fc polyclonal antibody as a primary antibody and a goat anti-rabbit IgG antibody (Dako) as a secondary antibody, almost all thereof existed as aggregates, like the abovementioned purified products (FIG. 1B)

[0384] Meanwhile, commercially available DcR3 FL-Fc (R&D Systems, Inc.) expressed using insect cells Sf21 showed almost no aggregation, and there was a difference in aggregability depending on the types of host cells producing wild-type DcR3 (FIG. 1C). By the following method using insect cells S2 as host cells, DcR3 FL-Fc (SEQ ID NO: 100), R218Q-Fc (U.S. Pat. No. 6,835,814 B1, U.S. Pat. No. 6,965,012 B1, SEQ ID NO: 340) obtained by introducing into human DcR3 (SEQ ID NO: 2) an R218Q mutation (i.e., substitution of Arg at position 218 with Gln), and S195-Fc lacking HBD (SEQ ID NO: 102) were produced, and aggregabilities were evaluated. One of a DNA fragment (SEQ ID NO: 3) of human DcR3, a DNA fragment (SEQ ID NO: 111) obtained by introducing into human DcR3 an R218Q mutation, and a DNA fragment (SEQ ID NO: 107) of human DcR3 lacking HBD was artificially synthesized connected to a DNA fragment (SEQ ID NO: 105) of a linker sequence IEGRMD and a DNA fragment (SEQ ID NO: 71) of Fc (g1S), and using pMTBiPV5-HisA (Thermo Scientific) and Drosophila Expression System (Thermo Scientific), an S2 cell line that stably expresses each of DcR3 FL-Fc, R218Q-Fc and S195-Fc was obtained. From the culture supernatants of the cells of the stable expression cell lines, affinity purification by MabSelect SuRe was performed using the same method as mentioned above.

[0385] As a result, DcR3 FL-Fc, R218Q-Fc and S195-Fc that were produced using S2 cells showed almost no aggregation (FIG. 1C). Quantitative evaluation of the aggregate content was performed by gel filtration chromatography (SEC) (TSKgei G3000 SWXL 7.8 mm×300 mm) (Tosoh Corporation) using HPLC (Shimadzu Corporation). S195-Fc derived from each of Expi293 and S2 was analyzed, and the proportions (%) of monomers, aggregates and degradants calculated from the peak areas are shown in Table 1.

TABLE 1

| Host cell | Monomer | Aggregate | Degradant |
|---|---|---|---|
| Expi293 | 15.1% | 81.9% | 3.0% |
| S2 | 84.9% | 15.1% | 0.0% |

[0386] The above results revealed that, when wild-type DcR3 is expressed using a mammalian cell, the generation amount of aggregates is increased.

### [Example 2] Production of DcR3 Variant That Is Not Aggregated in Mammalian Cell Expression System

[0387] There has not been known a human DcR3 variant that is not aggregated in a mammalian cell expression system. Thus, it was attempted to produce a DcR3 variant that results in a decreased amount of aggregates while maintaining the activity of DcR3. DcR3 is a soluble molecule consisting of 300 residues, and has a signal peptide at the N-terminal side, followed by four cysteine rich domains (CRD1, CRD2, CRD3, CRD4), which are characteristic of a TNF receptor superfamily (TNFRSF), and the C-terminal side of DcR3 consists of a heparan sulfate binding domain (HBD), which includes a heparan sulfate-binding motif and is rich in basic amino acids (FIG. 2, 3A). All of LIGHT, TL1A and FasL, which are DcR3 ligands, bind to CRD2 and CRD3 of DcR3. Thus, while maintaining a region including CRD2 and CRD3 of DcR3, CRD1 and/or CRD4 of DcR3 was/were substituted with CRD1 and/or CRD4 of a soluble decoy receptor osteoprotegerin (OPG), which is a related TNFRSF molecule, thus producing a DcR3 variant.

[0388] Various DcR3 variants having various structures, i.e.,

[0389] chimera A-Fc (FIG. 3C, SEQ ID NO: 80 or 82) obtained by fusion of chimera A (SEQ ID NO: 54) and an Fc sequence, wherein the chimera A was obtained by introducing into human DcR3, substitution of amino acid sequences of CRD1 and CRD4 with amino acid sequences of CRD1 and CRD4 of human OPG, respectively, and removal of an amino acid sequence of HBD, while maintaining amino acid sequences of CRD2 and CRD3 of human DcR3, and wherein the Fc sequence was selected from IEGRMD g1S (SEQ ID NO: 339) and g4PEK (SEQ ID NO: 74) obtained by introducing into an Fc region of heavy chain of human IgG4, substitution of Ser at EU-index position 228 with Pro, substitution of Leu at EU-index position 235 with Glu, and substitution of Arg at EU-index position 409 with Lys;

[0390] chimera B-Fc (FIG. 3G, SEQ ID NO: 76) obtained by fusion of chimera B (SEQ ID NO: 50) and an Fc sequence (IEGRMD g1S), wherein the chimera B was obtained by introducing into human DcR3, substitution of an amino acid sequence of CRD1 with an amino acid sequence of CRD1 of human OPG, and removal of an amino acid sequence of HBD, while maintaining amino acid sequences of CRD2, CRD3 and CRD4 of human DcR3;

[0391] chimera C-Fc (FIG. 3H, SEQ ID NO: 78) obtained by fusion of chimera C (SEQ ID NO: 52) and an Fc sequence (IEGRMD g1S), wherein the chimera C was obtained by introducing into human DcR3, substitution of an amino acid sequence of CRD4 with an amino acid sequence of CDR4 of human OPG, and removal of an amino acid sequence of HBD, while maintaining amino acid sequences of CRD1, CRD2 and CRD3 of human DcR3; and

[0392] 103-123OPG-Fc (g4PEK) (FIG. 3D, SEQ ID NO: 84) obtained by fusion of 103-123OPG (SEQ ID NO: 56) and an Fc sequence (g4PEK), wherein the 103-1230PG was obtained by introducing into CRD3 of chimera A, substitution of an amino acid sequence including a part at positions 18 to 36 and two amino acids at the C-terminal side thereof with an amino acid sequence of human OPGwere produced by the following method. In the DcR3 variant including CRD4 derived from DcR3, a TS sequence corresponding to an amino acid sequence at positions 194 to 195 of DcR3 (SEQ ID NO: 2) was added to the C-terminus of the CRD4. In the DcR3 variant including CRD4 derived from OPG, an SGNSESTQK sequence corresponding to an amino acid sequence at positions 186 to 194 of OPG (SEQ ID NO: 14) was added to the C-terminus of the CRD4.

[0393] A DNA fragment of a signal peptide sequence and a DNA fragment encoding chimera A, chimera B, chimera C or 103-1230PG lacking an HBD sequence (chimera A: SEQ ID NO: 53, chimera B: SEQ ID NO: 49, chimera C: SEQ ID NO: 51, 103-1230PG: SEQ ID NO: 55) were artificially synthesized, followed by insertion into a pClpuro vector by the same method as in Example 1 in such a manner that the DNA fragments were linked to a DNA fragment (SEQ ID NO: 338, 73) encoding an Fc sequence (IEGRMD g1S or g4PEK), thus obtaining a plasmid into which DNA fragments (chimera A-Fc: SEQ ID NO: 79 or 81, chimera B-Fc: SEQ ID NO: 75, chimera C-Fc: SEQ ID NO: 77, 103-1230PG-Fc: SEQ ID NO: 83) encoding various DcR3 variants were inserted. In the same manner as in Example 1, the plasmid thus obtained was introduced into host cells selected from Freestyle CHO—S cells, Freestyle 293F cells and Expi293 cells to transiently express a protein, and from the culture supernatant, affinity purification by MabSelect SuRe was performed.

[0394] The proportions (%) of monomers, aggregates and degradants of the various DcR3 variants produced were calculated by SEC-HPLC using the same method as in Example 1, or by SEC (Waters K. K.) using ACQUITY UPLC Protein BEH SEC 4.6 mm×150 mm (Table 2).

TABLE 2

| | | Host | Mono- | Aggre- | |
|---|---|---|---|---|---|
| DcR3 variant | Fc | cell | mer | gate | Degradant |
| Chimera A-Fc | IEGRMD g1S | CHO-S | 93.8% | 4.6% | 1.6% |
| Chimera A-Fc | g4PEK | Expi293 | 96.6% | 3.4% | 0.0% |
| Chimera B-Fc | IEGRMD g1S | Expi293 | 83.8% | 15.4% | 0.8% |
| Chimera C-Fc | IEGRMD g1S | Expi293 | 70.0% | 29.5% | 0.5% |
| 103-123OPG- | g4PEK | Expi293 | 98.5% | 1.5% | 0.0% |
| Fc | | | | | |

[0395] As a result, in each of the DcR3 variants, i.e., chimera A-Fc, chimera B-Fc, chimera C-Fc and 103-1230PG-Fc, the proportion of aggregates was decreased compared to that of wild-type DcR3. The effect on decreasing aggregates was highest in chimera A-Fc, followed by chimera B-Fc and chimera C-Fc. Therefore, it was shown that each of substitution with CRD1 derived from OPG and substitution with CRD4 derived from OPG has an effect on decreasing aggregation, and that a combination of substitution with CRD1 and substitution with CRD4 has an effect on further decreasing aggregation.

[0396] As a result of subjecting chimera A-Fc, chimera B-Fc and chimera C-Fc (each including IEGRMD g1S) to SDS-PAGE under non-reducing conditions and 100 mM DTT reducing conditions, almost no smear or ladder was observed in chimera A-Fc and chimera B-Fc even when the variants were produced using mammalian cells as host cells (FIG. 4).

[0397] In order to calculate the absolute molecular weight, an analysis by SEC (TSKgel G3000 SWXL 7.8 mm×300 mm) (Tosoh Corporation) using HPLC (Prominence, Shimadzu Corporation) was performed for chimera A-Fc (IEGRMD g1S or g4PEK) and 103-1230PG-Fc (g4PEK). After separation at a flow rate of 0.75 mL/min using a 50 mmol/L phosphate buffer (pH 7.0, 500 mmol/L NaCl) as a mobile phase, the scattered light intensity of each peak detected at a wavelength of 215 nm was detected by multi angle light scattering (MALS) (miniDAWN TREOS, Wyatt Technology Corporation), and the absolute molecular weight (% represents uncertainty) was calculated using the scattered light intensity. The results are shown in Table 3.

TABLE 3

| DcR3 variant | Fc | Molecular weight (%) | | kDa |
|---|---|---|---|---|
| Chimera A-Fc | IEGRMD g1S | 8.858 × 10⁴ | (1%) | 89 |
| Chimera A-Fc | g4PEK | 9.744 × 10⁴ | (0.8%) | 97 |
| 103-123OPG-Fc | g4PEK | 1.052 × 10⁵ | (0.7%) | 105 |

[0398] The molecular weights of dimers predicted from the amino acid sequences of chimera A-Fc (IEGRMD g1S or g4PEK) and 103-1230PG-Fc are 92.0 kDa, 90.1 kDa and 90.5 kDa, respectively, and thus it was confirmed that each of the DcR3 variants exists as dimers.

### [Example 3] Analysis of Proportion of N-Linked Glycosylation of Chimera A-Fc (g4PEK) and Evaluation of Influence on Aggregability

[0399] From the amino acid sequence of chimera A-Fc (g4PEK) (SEQ ID NO: 82), it is predicted that the CRD4 derived from OPG includes three potential N-linked glycosylation sites each consisting of Asn (N131, N144, N157), and that the Fc region includes one potential N-linked glycosylation site consisting of Asn (N260). Thus, the presence or absence of N-linked glycosylation of chimera A-Fc (g4PEK) was evaluated by the following method. As the sample preparation, chimera A-Fc (g4PEK) was subjected to reduction and alkylation treatments and the N-linked glycans of chimera A-Fc (g4PEK) were cleaved by PNGaseF treatment, and then the proteins were digested by each protease of trypsin, endoproteinase Asp-N and chymotrypsin. The peptide mixture thus obtained was dissolved in 5% (v/v) acetonitrile/0.1% formic acid, followed by an analysis with a liquid chromatography-electrospray ionization-mass spectrometer (LC-ESI-MS). Using MAGIC2000 HPLC (Michrom Bioresources, Inc.) equipped with a C18 reversed-phase column (0.2 mm×150 mm) (GL Science Inc.) and LTQ Orbitrap XL ion trap-Orbitrap hybrid mass spectrometer (Thermo Scientific), an analysis was performed by gradient elution of 5-65% (v/v) acetonitrile/0.1% formic acid. The peptide fragments thus obtained were identified by a MASCOT analysis (Matrix Science Inc.) using the amino acid sequence of chimera A-Fc (g4PEK). Using as an index the mass increase by 0.984 Da caused by PNGaseF treatment for converting N-linked glycosylated Asn to Asp, a peptide exhibiting a shift in a peak of an MS spectrum and a glycosylation site included in the peptide were identified. As a result, it was shown that N-linked glycans were added for each of the Asn residues N131, N144, N157 and N260. Of these, regarding N157 and N260, glycans were added in almost all peptide fragments, while regarding N131 and N144, both of glycosylated fragments and non-glycosylated fragments were detected.

[0400] Next, in order to evaluate the influence on the aggregability of N-linked glycans added to three sites each consisting of Asn (N131, N144, N157) of CRD4 derived from OPG, an amino acid substitute lacking glycans at two sites of N131 and N144 or at three sites of N131, N144 and N157 was produced. As a variant lacking the two glycans, N131S/N1445-Fc (g4PEK) (SEQ ID NO: 86) obtained by substitution of each of N131 and N144 with Ser or T133A/S146A-Fc (g4PEK) (SEQ ID NO: 88) obtained by substitution of each of T133 and 5146 with Ala was produced. As a variant lacking the three glycans, N131S/N144S/N157S-Fc (g4PEK) (SEQ ID NO: 90) obtained by substitution of each of N131, N144 and N157 with Ser or T133A/S146A/T159A-Fc (g4PEK) (SEQ ID NO: 92) obtained by substitution of each of T133, S146 and T159 with Ala was produced. A DNA fragment of a signal peptide sequence and DNA fragments (SEQ ID NO: 85, 87, 89, 91) encoding the respective variants lacking the glycans were artificially synthesized, followed by insertion into a pClpuro vector by the same method as in Example 1, and each DNA fragment was introduced into Expi293 cells. Each of the variants lacking the glycans was transiently expressed, and then affinity purification from using the culture supernatant by MabSelect SuRe was performed. Each of the produced variants lacking the glycans was analyzed by SEC-UPLC (apparatus: ACQUITY UPLC, column; ACQUITY UPLC Protein BEH SEC 200 A, 1.7 μm, 4.6×150 mm) (Waters K. K.). The proportions (%) of monomers, aggregates and degradants calculated from the peak areas are shown in Table 4.

TABLE 4

| Variant lacking | | | | |
|---|---|---|---|---|
| glycans | Fc | Monomer | Aggregate | Degradant |
| N131S/N144S-Fc | g4PEK | 92.5% | 7.5% | 0.0% |
| T133A/S146A-Fc | g4PEK | 91.2% | 8.8% | 0.0% |
| N131S/N144S/ | g4PEK | 64.0% | 36.0% | 0.0% |
| N157S-Fc | | | | |
| T133A/S146A/ | g4PEK | 62.3% | 37.7% | 0.0% |
| T159A-Fc | | | | |

[0401] Regarding the aggregate contents of the variants lacking the two glycans, the aggregates were slightly increased in all of the amino acid substitutes compared to those of chimera A-Fc (Table 2), and regarding the aggregate contents of the variants lacking the three glycans, further increases in the aggregates were observed in all of the amino acid substitutes. From these results, it was shown that, of the N-linked glycans at three sites (N131, N144, N157) added to CRD4 derived from OPG, particularly a glycan added to N157, contributes to a decrease in the aggregates of chimera A. Meanwhile, even when all of the N-linked glycans at three sites were removed, the aggregates were decreased compared to those of DcR3 FL-Fc and S195-Fc (Table 1). Therefore, it was shown that each of an N-linked glycan and a sequence of OPG has an effect on decreasing the aggregates of wild-type DcR3, and that a combination of both has an effect on further decreasing the aggregates.

### [Example 4] Evaluation of Physical Property of Various DcR3 Variants

[0402] In order to analyze the cause of the effect on decreasing aggregation of various DcR3 variants produced in Examples 2 and 3, the following physical and chemical analyses were performed. Hydrophobic interaction chromatography (HIC) is an analysis method in which the higher the hydrophobicity of a protein surface is, the longer the elution time from a column is. Using a hydrophobic interaction chromatography column (TSKgel Butyl-NPR 4.6 mm×35 mm) (Tosoh Corporation), and using a gradient of buffer A (2 mmol/L ammonium sulfate, 20 mmol/L Tris buffer, pH 7.0) and buffer B (20 mmol/L Tris buffer, pH 7.0) as a mobile phase, 8 μg of a sample was separated at a flow rate of 0.5 mL/min, and the elution time (min) was detected at a wavelength of 215 nm. The elution time (min) is shown in Table 5.

TABLE 5

| | | | Host | Elution |
|---|---|---|---|---|
| | | Fc | cell | time (min) |
| Wild-type | R218Q-Fc | IEGRMD g1S | S2 | 39.8 |
| DcR3 control | S195-Fc | IEGRMD g1S | S2 | 36.7 |
| DcR3 | Chimera A-Fc | IEGRMD g1S | CHO-S | 37.8 |
| variant | Chimera A-Fc | g4PEK | Expi293 | 38.7 |
| | Chimera C-Fc | IEGRMD g1S | Expi293 | 39.7 |
| | 103-123OPG-Fc | g4PEK | Expi293 | 37.8 |
| | N131S/ | g4PEK | Expi293 | 39.2 |
| | N144S-Fc | | | |
| | T133A/ | g4PEK | Expi293 | 39.3 |
| | S146A-Fc | | | |
| | N131S/N144S/ | g4PEK | Expi293 | 40.6 |
| | N157S-Fc | | | |
| | T133A/S146A/ | g4PEK | Expi293 | 40.9 |
| | T159A-Fc | | | |

[0403] Each of S195-Fc derived from S2 and the variants derived from mammalian cells, i.e., chimera A-Fc (IEGRMD g1S, g4PEK), 103-1230PG-Fc (g4PEK) and the variants lacking the two glycans, showed a shorter elution time as compared to R218Q-Fc corresponding to a one-amino-acid mutant of full-length DcR3 produced using insect cells S2. It is considered that a decrease in hydrophobicity resulted in improvement in the physical property and a decrease in the amount of aggregates. Regarding chimera C and the variants lacking the three glycans, each of which exhibited the slightly-attenuated effect of decreasing the amount of aggregates, the hydrophobicities were equivalent or superior to that of R218Q-Fc, and it was shown that there is a correlation between the proportion of aggregates and the hydrophobicity of the protein.

[0404] Subsequently, the thermostability of the protein was evaluated by the differential scanning fluorimetry (DSF) method. In a 96-well white microplate (Bio-Rad Laboratories, Inc.), 9.5 μg of various DcR3 variants and 1 μL of SYPRO Orange Protein Gel Stain (Invitrogen) diluted with water 50-fold were mixed in 20 μL of a system, and the temperature was raised from 20° C. to 95° C. by 0.5° C. every 10 seconds using a

[0405] C1000 thermal cycler (Bio-Rad Laboratories, Inc.).

[0406] Fluorescence at each temperature was detected with a FRET channel, and the melting curve (FIG. 5) and the melting temperature (Tm value) (° C.) (Table 6) were calculated using CFX Manager software (Bio-Rad Laboratories, Inc.).

TABLE 6

| | | | Host | | |
|---|---|---|---|---|---|
| | | Fc | cell | Tm1 | Tm2 |
| Wild-type | R218Q-Fc | IEGRMD g1S | S2 | 47.5 | 60.5 |
| DcR3 | S195-Fc | IEGRMD g1S | S2 | 62.0 | 81.0 |
| control | | | | | |
| DcR3 | Chimera A-Fc | IEGRMD g1S | CHO-S | 66.5 | 82.5 |
| variant | Chimera A-Fc | g4PEK | Expi293 | 61.0 | 82.5 |
| | Chimera C-Fc | IEGRMD g1S | Expi293 | 67.5 | 82.0 |
| | 103-123OPG-Fc | g4PEK | Expi293 | 61.0 | 82.5 |
| | N131S/ | g4PEK | Expi293 | 60.0 | 82.5 |
| | N144S-Fc | | | | |
| | T133A/S146A-Fc | g4PEK | Expi293 | 60.0 | 82.5 |
| | N131S/N144S/ | g4PEK | Expi293 | 61.0 | 83.0 |
| | N157S-Fc | | | | |
| | T133A/S146A/ | g4PEK | Expi293 | 61.0 | 83.5 |
| | T159A-Fc | | | | |

[0407] S195-Fc derived from S2 showed a greatly increased Tm value and improved thermostability as compared to R218Q-Fc corresponding to a one-amino-acid mutant of full-length DcR3 produced using insect cells S2. This suggests that an HBD region contributes to thermolability. Chimera A-Fc (IEGRMD g1S) derived from a mammalian cell showed a further increased Tm value as compared to 5195-Fc. This reveals that a DcR3 variant in which a part of CRDs of DcR3 has been substituted with a part of CRDs of OPG shows not only decreased aggregability but also improved thermostability of the protein (Table 6, FIG. 5).

### [Example 5] Evaluation of Reactivity of DcR3 Variant Lacking Heparan Sulfate-Binding Domain (HBD) with Human Normal Cell and CHO Cell

[0408] It has been reported that in vivo kinetics of wild-type DcR3 and a mutant thereof, FLINT (R218Q mutation), in mice and cynomolgus monkeys are extremely poor (Drug Metabolism and Disposition, 2003, 31: p.502-507). One of the factors thereof is considered as the fact that DcR3 directly binds to heparan sulfate proteoglycan on the cell membrane by a heparan sulfate-binding domain (HBD) existing in wild-type DcR3 (J. Immunol., 2006, 176: 173-180).

[0409] Thus, the reactivities of DcR3 variants lacking HBD, i.e., 5195-Fc, chimera A-Fc (IEGRMD g1S, g4PEK) and 103-1230PG-Fc (g4PEK) with human primary cells and CHO cells (producing cells) were analyzed by flow cytometry (FCM). As a positive control, DcR3 FL-Fc including an HBD region was used, and as negative controls, K194-Fc and an anti-DNP antibody (g4PEK) were used. K194-Fc (amino acid sequence: SEQ ID NO: 152, nucleotide sequence of DNA: SEQ ID NO: 151) is a protein obtained by fusing an IEGRMD linker (SEQ ID NO: 106) and an amino acid sequence (SEQ ID NO: 72) of Fc (g1S) to an amino acid sequence of a part extending from Met at position 1 to Lys at position 194 of OPG (SEQ ID NO: 14), and using the method mentioned in Example 1, K194-Fc was transiently expressed using Expi293 cells, and purified from the culture supernatant using Mabselect SuRe (GE Healthcare). As the anti-DNP antibody (g4PEK), an antibody obtained by inserting the nucleotide sequence of the variable region of the anti-2,4-dinitrophenol (DNP) antibody mentioned in Clin. Cancer Res., 2005, 11(8), p.3126-3135 into a vector encoding an Fc sequence (g4PEK), followed by introduction into CHO cells to express, and performing Protein A purification from the culture supernatant, was used. As the human primary cells, HUVECs (Lonza K. K.) and male human hepatocytes (BioreclamationlVT, LLC) were used. The human primary cells were cultured with a medium designated for each cell in accordance with the package insert using a collagen-coated adherent plate (IWAKI). The CHO cells were suspension-cultured with EX-CELL 325 PF CHO Serum-Free Medium (Sigma Aldrich Co. LLC).

[0410] HUVECs and hepatocytes were detached using a 0.02% EDTA solution and a cell scraper, and passed through a cell strainer (40 pm). The detached HUVECs and hepatocytes and CHO cells collected from the suspension culture solution were washed with an FCM buffer (PBS containing 1% BSA, 1 mmol/L EDTA and 0.05% NaN₃), and then suspended with an FCM buffer.

[0411] Next, the cells were seeded in a 96-well U-bottom plate (Falcon) so that the concentrations were 1×10⁵ cells/well, and each Fc fusion protein produced was added so that the concentration was 10 μg/mL, followed by reaction on ice for 1 hour. The cells were washed with an FCM buffer, and then suspended with LIVE/DEAD Fixable Aqua Dead Cell Stain Kit (Molecular Probes) and 0.1 μg/mL of Goat F(ab′)₂ Anti-Human IgG R-phycoerythrin Conjugate (Southern Biotechnology Associates, Inc.), followed by staining on ice for 1 hour. During staining of HUVECs and hepatocytes, Human FcR Blocking Reagent (Miltenyi Biotec K. K.) was added. The cells were washed with an FCM buffer, and then the fluorescence intensity was analyzed by flow cytometer FACS Fortessa (BD Biosciences).

[0412] As a result of analysis of the PE staining intensities for viable cell fractions that were negative for LIVE/DEAD Fixable Aqua Dead Cell Stain Kit, DcR3 FL-Fc (IgG1) (R&D Systems, Inc.) showed remarkable binding to all of HUVECs, hepatocytes and CHO cells. Meanwhile, all of the DcR3 variants lacking HBD showed no binding (FIG. 6).

### [Example 6] Evaluation of Mouse In Vivo Kinetics of DcR3 Variant

TABLE 7

| | | Fc | Host cell |
|---|---|---|---|
| Wild-type | S195-Fc | IEGRMD g1S | S2 |
| DcR3 control | Chimera A-Fc | IEGRMD g1S | CHO-S |
| DcR3 | Chimera A-Fc | g4PEK | CHO-S |
| variant | Chimera A-Fc | g4PEK | CHO |
| | 103-123OPG-Fc | g4PEK | CHO |
| | T133A/S146A-Fc | g4PEK | CHO-S |

[0414] A kinetic study in mouse on 5195-Fc and each of the DcR3 variants shown in Table 7 was conducted. Regarding chimera A-Fc (g4PEK) and 103-1230PG-Fc (g4PEK), each of the DcR3 variants was produced by stable expression in CHO cells using the following method. A DNA fragment of a signal peptide sequence and DNA fragments (SEQ ID NO: 81, 83) encoding the respective DcR3 variants were artificially synthesized, followed by insertion into a recombinant vector produced by the method mentioned in WO 2012/081628 using the same method as in Example 1, and the vectors were introduced into CHO cells by electroporation. Culture and drug selection were performed by the general method, and cell lines in which the proportions of viable cells collected to about 98% were regarded as stable expression cell lines. The cells of these stable expression cell lines were cultured in a medium such as EX-CELL 325 PF CHO Serum-Free Medium (Sigma Aldrich Co. LLC) for a certain period of time, followed by collection of the culture supernatants, and each of the DcR3 variants was purified by the method mentioned in Example 1.

[0415] Single i.v. administration of 10 mg/kg of 5195-Fc or each of the DcR3 variants was performed to 5- to 6-week-old BALB/c mice (female) (n=2 or 3), followed by blood collection from the tail vein at an appropriate time after administration, and concentrations of 5195-Fc and each of the DcR3 variants in blood were measured by the following method. A biotinylated monkey anti-human IgG polyclonal antibody was reacted with a streptavidin-immobilized bead, and 5195-Fc and each of the DcR3 variants in serum bound to the biotinylated monkey anti-human IgG polyclonal antibody were detected with an Alexa Fluor 647-labeled monkey anti-human IgG polyclonal antibody. Measurement was performed using Gyrolab xP workstation (Gyros AB), and each kinetic parameter was calculated by the moment analysis method. As the standard substance for preparation of a calibration curve, the same substance as the test substance administered to the animals was used. The time courses of blood concentrations of 5195-Fc produced using S2 cells and chimera A-Fc (IEGRMD g1S) produced using CHO—S cells are shown in FIG. 7. Regarding each of S195-Fc and the DcR3 variants shown in Table 7, the half-life in blood (h) during the elimination phase and the area under the concentration-time curve to infinity AUCO-∞ (μg*h/mL) after single administration are shown in Table 8.

TABLE 8

| | | | | Half-life | |
|---|---|---|---|---|---|
| | | | Host | in blood | AUC0-∞ |
| | | Fc | cell | (h) | (μg*h/mL) |
| Wild-type | S195-Fc | IEGRMD | S2 | 84.1 | 354 |
| DcR3 | | g1S | | | |
| control | | | | | |
| DcR3 | Chimera A-Fc | IEGRMD | CHO-S | 87.9 | 7140 |
| variant | | g1S | | | |
| | Chimera A-Fc | g4PEK | CHO-S | 114 | 5680 |
| | Chimera A-Fc | g4PEK | CHO | 89.5 | 4530 |
| | 103-123OPG- | g4PEK | CHO | 79.3 | 2400 |
| | Fc | | | | |
| | T133A/S146A- | g4PEK | CHO-S | 114 | 5810 |
| | Fc | | | | |

[0416] The time course of blood concentration of each of the DcR3 variants was greatly improved (FIG. 7), the half-life of each of the DcR3 variants was almost equivalent, and the AUCO-00 of each of the DcR3 variants was improved 10-fold or more (Table 8), compared to those of S195-Fc corresponding to a wild-type DcR3 control.

[0417] It has been reported that, after single i.v. administration of 0.5 mg/kg of wild-type DcR3 or FLINT (R218Q mutation) to CD-1 mice, the half-life in blood was 1.2 hours and 3.1 hours, respectively, and the AUCO-∞ (μg*h/mL) was 0.48 and 0.36, respectively (Drug Metabolism and Disposition, 2003. 31: p.502-507.). When the time courses of concentrations multiplied by a dose ratio assuming linearity were compared, the DcR3 variant showed higher exposure than that of wild-type DcR3 and FLINT.

### [Example 7] Evaluation of Binding Activity to DcR3 Ligand (1) Production of DcR3 Ligand

[0418] Soluble recombinants of DcR3 ligands (LIGHT, TL1A, FasL) of a human, a cynomolgus monkey or a mouse were produced (amino acid sequence: SEQ ID NO: 114, 116, 118, 120, 122, 124, 126, 128, 130, nucleotide sequence of DNA: SEQ ID NO: 113, 115, 117, 119, 121, 123, 125, 127, 129).

[0419] As a soluble recombinant LIGHT of a human, a cynomolgus monkey or a mouse, a sequence obtained by adding a His tag (His10) and a GS linker (GGGSGGGSGGGSIEGR) to the N-terminus and linking an extracellular region of LIGHT (human LIGHT: Asp74-Va1240 (SEQ ID NO: 132), cynomolgus monkey LIGHT: Asp74-Va1240 (SEQ ID NO: 134), mouse LIGHT: Asp72-Va1239 (SEQ ID NO: 136)) to downstream thereof was used.

[0420] As a soluble recombinant TL1A of a human, a cynomolgus monkey or a mouse, a sequence obtained by adding a His tag (His6) and a GS linker (GGGSGGGSGGGS) to the N-terminus and linking an extracellular region of TL1A (human TL1A: Leu72-Leu251 (SEQ ID NO: 138), cynomolgus monkey TL1A: Leu72-Leu251 (SEQ ID NO: 140), mouse TL1A: Ile94-Leu270 (SEQ ID NO: 142)) to downstream thereof was used.

[0421] As a soluble recombinant FasL of a human, a cynomolgus monkey or a mouse, a sequence obtained by adding a His tag (His6) to the N-terminus and linking an extracellular region of FasL (human FasL: Pro134-Leu281 (SEQ ID NO: 144), cynomolgus monkey FasL: Pro133-Leu280 (SEQ ID NO: 146), mouse FasL: Pro132-Leu279 (SEQ ID NO: 148)) to downstream thereof was used.

[0422] A DNA fragment of a signal peptide sequence and a DNA sequence of a soluble DcR3 ligand including an attached tag were artificially synthesized (GENEWIZ, Inc.), and using In-Fusion HD Cloning Kit (Clontech Laboratories, Inc.), they were inserted into downstream of a CMV promoter of a pCI-Hygro2.01 vector (pCI manufactured by Promega Corporation was partially modified), and Escherichia co/i DH5a competent cells (TOYOBO CO., LTD.) were transformed.

[0423] The plasmids thus obtained were introduced into Expi293 cells (Thermo Scientific) to transiently express the proteins. Using ExpiFectamine 293 (Thermo Scientific), the plasmids were introduced, and after culture for 3 days, the culture supernatants were collected.

[0424] Human FasL and cynomolgus monkey FasL were introduced into host cells of Freestyle CHO—S cells (Thermo Scientific) to transiently express proteins. Using Freestyle MAX Reagent (Thermo Scientific), the plasmids were introduced, and after culture for 3 days, the culture supernatants were collected.

[0425] Protein purification from the culture supernatants of the Expi293 cells was performed using Ni Sepharose Fast Flow resin and His Buffer Kit (all of which are manufactured by GE Healthcare). The culture supernatants were passed through a column filled with a resin, washed with a washing buffer (60 mmol/L imidazole, 20 mmol/L sodium phosphate, 0.5 mol/L NaCl, pH 7.4), and eluted with an elution buffer (250 mmol/L imidazole, 20 mmol/L sodium phosphate, 0.5 mol/L NaCl, pH 7.4).

[0426] Protein purification from the culture supernatants of the Freestyle CHO—S cells was performed using Complete His-Tag Purification Resin (Roche) and His Buffer Kit (GE Healthcare). The culture supernatants were passed through a column filled with a resin, washed with a washing buffer (2 mmol/L imidazole, 20 mmol/L sodium phosphate, 0.5 mol/L NaCl, pH 7.4), and eluted with an elution buffer (250 mmol/L imidazole, 20 mmol/L sodium phosphate, 0.5 mol/L NaCl, pH 7.4).

[0427] Each elution buffer of elution fractions was substituted with PBS using a NAP column (GE Healthcare) and passed through a 0.22 μm filter to perform sterilization. Regarding the purified proteins thus obtained, the purities were confirmed by SDS-PAGE. When formations of multimers were analyzed by SEC-UPLC (apparatus: ACQUITY UPLC, column; ACQUITY UPLC Protein BEH SEC 200A, 1.7 μm, 4.6×150 mm) (Waters K. K.), almost all recombinant soluble DcR3 ligands showed a peak of a molecular weight corresponding to a trimer, but in only mouse LIGHT, no peak of a trimer was detected, and a peak of a monomer was detected.

### (2) Measurement of Binding Activity Using BIAcore

[0428] Regarding each of the various wild-type DcR3 controls and the DcR3 variants shown in Table 9, the binding activities to DcR3 ligands (LIGHT, TL1A, FasL) were analyzed by the SPR method using BIAcore T-100 (GE Healthcare). As the buffer, HBS-EP+Buffer was used.

[0429] After 10,000 RU of anti-human antibodies were immobilized to Series S Sensor Chip CM5 using Human Antibody Capture Kit (GE Healthcare), various wild-type DcR3 controls and DcR3 variants were injected at the flow rate of 10 μL/min for 30 seconds and captured. Meanwhile, the buffer containing no protein was injected into reference flow cells. Thereafter, as an analyte, DcR3 ligands of a human, a cynomolgus monkey or a mouse diluted to 0.08 to 80 nmol/L were injected at 10 μL/min for 2 minutes to monitor the binding, and subsequently the buffer was injected for 3 minutes to monitor dissociation. Then, 3 mol/L magnesium chloride was injected at 20 μL/min for 1 minute to perform a regeneration reaction. By using BIAcore T-100 evaluation software and 1:1 Binding model, and by regarding each DcR3 ligand as a monomer (human LIGHT monomer: 20.8 kDa, human TL1A monomer: 22.1 kDa, human FasL monomer: 17.7 kDa, cynomolgus monkey LIGHT monomer: 20.8 kDa, cynomolgus monkey TL1A monomer: 22.0 kDa, cynomolgus monkey FasL monomer: 17.7 kDa, mouse LIGHT monomer: 20.9 kDa, mouse TL1A monomer: 21.5 kDa, mouse FasL monomer: 17.7 kDa), each kinetic constant (ka, kd, K_{D}) was calculated (Tables 10 to 12). As a result of measurement, except for mouse LIGHT for which a trimer could not be produced, it was confirmed that various wild-type DcR3 controls and DcR3 variants bind to each DcR3 ligand of a human, a cynomolgus monkey or a mouse.

TABLE 9

| | | Linker | Fc | Host cell |
|---|---|---|---|---|
| 1 | DcR3 FL-Fc (R&D | IEGRMD | IgG1 | Sf9 |
| | Systems, Inc.) | | | |
| 2 | S195-Fc | IEGRMD | g1S | S2 |
| 3 | Chimera A-Fc | IEGRMD | g1S | CHO-S |
| 4 | Chimera A-Fc | None | g4PEK | Expi293 |
| 5 | 103-123OPG-Fc | None | g4PEK | Expi293 |
| 6 | T133A/S146A-Fc | None | g4PEK | Expi293 |
| 7 | N131S/N144S-Fc | None | g4PEK | Expi293 |

TABLE 10
Binding affinity to LIGHT

| | Human LIGHT | | | Cynomolgus monkey LIGHT | | | Mouse LIGHT | | |
|---|---|---|---|---|---|---|---|---|---|
| | Kₐ | K_{d} | | Kₐ | K_{d} | | Kₐ | K_{d} | |
| | (1/Ms) | (1/s) | K_{D} | (1/Ms) | (1/s) | K_{D} | (1/Ms) | (1/s) | K_{D} |
| | 1 × E+05 | 1 × E−04 | (nM) | 1 × E+05 | 1 × E−04 | (nM) | 1 × E+05 | 1 × E−04 | (nM) |
| 1 | 3.8 | 4.0 | 1.1 | 3.1 | 3.8 | 1.2 | N.D. | N.D. | N.D. |
| 2 | 2.8 | 6.1 | 2.2 | 3.4 | 5.9 | 1.7 | N.D. | N.D. | N.D. |
| 3 | 3.9 | 2.5 | 0.63 | 5.4 | 2.4 | 0.44 | N.D. | N.D. | N.D. |
| 4 | 5.4 | 3.3 | 0.62 | N.T. | N.T. | N.T. | N.T. | N.T. | N.T. |
| 5 | 4.5 | 3.0 | 0.66 | N.T. | N.T. | N.T. | N.T. | N.T. | N.T. |
| 6 | 3.8 | 3.1 | 0.83 | N.T. | N.T. | N.T. | N.T. | N.T. | N.T. |
| 7 | 3.5 | 3.3 | 0.87 | N.T. | N.T. | N.T. | N.T. | N.T. | N.T. |

N.D.: Not detected
N.T.: Not tested

TABLE 11
Binding affinity to TL1A

| | Human TL1A | | | Cynomolgus monkey TL1A | | | Mouse TL1A | | |
|---|---|---|---|---|---|---|---|---|---|
| | Kₐ | K_{d} | | Kₐ | K_{d} | | Kₐ | K_{d} | |
| | (1/Ms) | (1/s) | K_{D} | (1/Ms) | (1/s) | K_{D} | (1/Ms) | (1/s) | K_{D} |
| | 1 × E+05 | 1 × E−04 | (nM) | 1 × E+05 | 1 × E−04 | (nM) | 1 × E+05 | 1 × E−04 | (nM) |
| 1 | 3.9 | 3.5 | 0.89 | 3.8 | 3.5 | 0.92 | 8.4 | 4.9 | 0.58 |
| 2 | 8.4 | 9.1 | 1.1 | 7.9 | 8.8 | 1.1 | 17 | 20 | 1.2 |
| 3 | 8.3 | 3.0 | 0.36 | 7.6 | 2.9 | 0.38 | 31 | 23 | 0.73 |
| 4 | 8.7 | 3.6 | 0.42 | N.T. | N.T. | N.T. | N.T. | N.T. | N.T. |
| 5 | 7.1 | 3.3 | 0.47 | N.T. | N.T. | N.T. | N.T. | N.T. | N.T. |
| 6 | 6.3 | 3.3 | 0.53 | N.T. | N.T. | N.T. | N.T. | N.T. | N.T. |
| 7 | 6.1 | 3.1 | 0.51 | N.T. | N.T. | N.T. | N.T. | N.T. | N.T. |

N.T.: Not tested

TABLE 12
Cynomolgus monkey FasL

| | Human FasL | | | Cynomolgus monkey FasL | | | Mouse FasL | | |
|---|---|---|---|---|---|---|---|---|---|
| | Kₐ | K_{d} | | Kₐ | K_{d} | | Kₐ | K_{d} | |
| | (1/Ms) | (1/s) | K_{D} | (1/Ms) | (1/s) | K_{D} | (1/Ms) | (1/s) | K_{D} |
| | 1 × E+05 | 1 × E−04 | (nM) | 1 × E+05 | 1 × E−04 | (nM) | 1 × E+05 | 1 × E−04 | (nM) |
| 1 | 3.1 | 4.0 | 1.3 | 3.0 | 3.3 | 1.1 | 1.5 | 97 | 65 |
| 2 | 8.6 | 15 | 1.7 | 7.5 | 8.4 | 1.1 | 5.8 | 56 | 96 |
| 3 | 10 | 7.8 | 0.76 | 8.4 | 4.0 | 0.47 | 12 | 587 | 47 |
| 4 | 10 | 10 | 1.0 | N.T. | N.T. | N.T. | N.T. | N.T. | N.T. |
| 5 | 8.5 | 12 | 1.4 | N.T. | N.T. | N.T. | N.T. | N.T. | N.T. |
| 6 | 5.6 | 13 | 2.3 | N.T. | N.T. | N.T. | N.T. | N.T. | N.T. |
| 7 | 5.7 | 15 | 2.5 | N.T. | N.T. | N.T. | N.T. | N.T. | N.T. |

N.T.: Not tested

### [Example 8] Evaluation of Binding Activity to OPG Ligands (RANKL, TRAIL)

[0430] It has been known that RANKL binds to RANK and is involved in bone resorption, and that TRAIL binds to a TRAIL receptor and is involved in cell death. Using various human DcR3 recombinants produced, the binding activities to RANKL and TRAIL were analyzed by ELISA. As positive controls that bind to the OPG ligands, K194-Fc corresponding to a variant lacking a C-terminus region of OPG, produced in Example 5, RANK-Fc (Enzo Life Sciences, Inc.) and TRAIL R1-Fc (R&D systems, Inc.) were used. As a negative control, an anti-DNP antibody (IgG1) corresponding to an antibody obtained by inserting the nucleotide sequence of the variable region of the anti-2,4-dinitrophenol (DNP) antibody mentioned in Clin. Cancer Res., 2005, 11(8), p.3126-3135 into a vector encoding Fc of IgG1, followed by introduction into CHO cells to express, and performing Protein A purification, was used.

[0431] Into 96-well plates (MAXISORP NUNC-IMMUNO PLATE, Thermo Scientific), anti-human IgG1 (American Qualex International, Inc.) prepared to 10 μg/mL with PBS was dispensed at 50 μL/well, followed by allowing to stand at 4° C. overnight for adsorption. After removal of the immobilizing solution, 1% Block Ace produced by dissolving 1 g of Block Ace powder (DS Pharma Biomedical Co., Ltd.) in 100 mL of water was dispensed at 100 μL/well, followed by allowing to stand at room temperature for 1 hour to perform blocking, and the plates were washed 3 times with PBS containing 0.1% Tween (hereinafter referred to as PBST). Then, into plate No. 1, various human DcR3 recombinants or various DcR3 variants and RANK-Fc diluted to the concentration of 1 μg/mL with 1% BSA-PBS were dispensed at 50 μL/well, and into plate No. 2, various wild-type DcR3 controls or various DcR3 variants and TRAIL R1-Fc diluted to the concentration of 1 μg/mL with 1% BSA-PBS were dispensed at 50 μL/well, followed by allowing to stand at room temperature for 1 hour.

[0432] After each plate was washed 3 times with PBST, into plate No. 1, RANKL (Peprotech, Inc.) diluted to 0.64 to 50,000 μg/mL with 1% BSA-PBS was dispensed at 50 μL/well, and into plate No. 2, TRAIL (Peprotech, Inc.) to 0.64 to 50,000 μg/mL diluted with 1% BSA-PBS was dispensed at 50 μL/well, followed by allowing to stand at room temperature for 1 hour.

[0433] After each plate was washed 3 times with PBST, into plate No. 1, a biotinylated anti-RANKL antibody (Peprotech, Inc.) diluted to 0.4 μg/mL with 1% BSA-PBS was dispensed at 50 μL/well, and into plate No. 2, a biotinylated anti-TRAIL antibody (R&D Systems, Inc.) diluted to 0.4 μg/mL with 1% BSA-PBS was dispensed at 50 μL/well, followed by allowing to stand at room temperature for 1 hour.

[0434] After each plate was washed 3 times with PBST, streptavidin-HRP (PIERCE) diluted 10,000-fold with 0.1% Block Ace was dispensed thereinto at 50 μL/well, followed by allowing to stand at room temperature for 1 hour.

[0435] After each plate was washed 3 times with PBST, TMB+Substrate Chromogen (Dako) was dispensed at 50 μL/well, followed by allowing to stand at room temperature for 1 minute. 0.5 mol/L sulfuric acid solution was dispensed at 50 μL/well to stop the chromogenic reaction, and the absorbances at a sample wavelength of 450 nm and a reference wavelength of 570 nm were measured using a plate reader.

[0436] As a result, K194-Fc showed binding to RANKL and TRAIL, which are OPG ligands, and RANK-Fc and TRAIL R1-Fc showed binding to RANKL and TRAIL, respectively, but DcR3 FL-Fc (R&D Systems, Inc.), 5195-Fc, chimera A-Fc (IEGRMD g1S) and chimera B-Fc (IEGRMD g1S) did not show binding to any of the ligands (FIG. 8). In conjunction with the results of Example 7, it was confirmed that DcR3 variants produced by substituting a part of CRDs of DcR3 with a part of CRDs of OPG show binding activities to DcR3 ligands equivalent to that of wild-type DcR3, but do not bind to OPG ligands.

### [Example 9] Measurement of Neutralizing Activity to DcR3 Ligand

[0437] By the following method, the neutralizing activities of various wild-type DcR3 controls and DcR3 variants to LIGHT, TL1A and FasL were measured. A DNP antibody was produced by the methods mentioned in Examples 5 and 8.

### (1) Measurement of Neutralizing Activity to LIGHT

[0438] Using a human colon cancer cell HT-29 cell line (ATCC Number: HTB-38), the neutralizing activities of various wild-type DcR3 controls and various DcR3 variants were measured using IL-8 production by addition of LIGHT as an index. For cell culture and evaluation of the neutralizing activity, a McCoy's 5A medium (Gibco) supplemented with 10% FBS (Gibco) and penicillin/streptomycin (Nacalai Tesque, Inc.) was used.

[0439] The cells of HT-29 cell line were seeded at 2×10⁴ cells/well in a 96-well adherent culture plate (Sumitomo Bakelite Co., Ltd.), and then various wild-type DcR3 controls or various DcR3 variants were added at the final concentration of 0.1, 1 or 10 μg/mL. Thereafter, human LIGHT (Gly66-Va1240) including a FLAG tag (DYKDDDDK) added to the N-terminus (mentioned in JP 2013153749 A) was added at the final concentration of 0.1 μg/mL so that the total amount of the culture solution was adjusted at 200 μL/well. After culture in a 5% CO2 incubator at 37° C. for 3 days, the culture supernatant was collected, and the IL-8 concentration in the culture supernatant was measured using Alpha LISA IL-8 Immunoassay Research Kit (PerkinElmer, Inc.).

[0440] As a result of the measurement, it was confirmed that, in each of the various human DcR3 variants, the production amount of IL-8 is concentration-dependently decreased, and the neutralizing activity to LIGHT is exhibited (FIG. 9).

### (2) Measurement of Neutralizing Activity to TL1A

[0441] Using a human T cell, the neutralizing activities of various wild-type DcR3 controls and various DcR3 variants were measured using IFN-γ production by addition of TL1A as an index. For cell culture and evaluation of the neutralizing activity, an X-VIVO15 medium (Lonza K. K.) was used.

[0442] Frozen healthy individual PBMCs (AlICells, LLC) were thawed in a water bath at 37° C., and suspended in a medium containing DNasel (STEMCELL Technologies Inc.) warmed to 37° C. After shaking at a low speed at 37° C. for 2 hours, T cells were isolated using EasySep Human T cell Enrichment Kit (STEMCELL Technologies Inc.). The isolated T cells were seeded at 1×10⁵ cells/well in a 96-well suspension culture plate (Sumitomo Bakelite Co., Ltd.), and then various wild-type DcR3 controls or various DcR3 variants were added at the final concentration of 0.1, 1 or 10 μg/mL. Thereafter, the recombinant His10 human TL1A produced in Example 6 was added at the final concentration of 0.1 μg/mL. Human IL-12 (Miltenyi Biotec K. K.) at a final concentration of 2 ng/mL and Recombinant Human IL-18 (MEDICAL & BIOLOGICAL LABORATORIES CO., LTD.) at a final concentration of 50 ng/mL were added so that the total amount of the culture solution was adjusted to 200 μL/well. After culture in a 5% CO2 incubator at 37° C. for 3 days, the culture supernatant was collected, and the IFN-γ concentration in the culture supernatant was measured using AlphaLISA IFN-γ Immunoassay Research Kit (PerkinElmer, Inc)[0303]

[0443] As a result of the measurement, it was confirmed that, in each of the various DcR3 variants, the production amount of IFN-γ is concentration-dependently decreased, and the neutralizing activity to TL1A is exhibited (FIG. 10).

### (3) Measurement of Neutralizing Activity to FasL

[0444] Using a T-cell leukemia Jurkat cell line (DSMZ Number: ACC 282), the neutralizing activities of various wild-type DcR3 controls and various DcR3 variants were measured using apoptosis by addition of FasL as an index. For cell culture and evaluation of the neutralizing activity, an RPMI1640 medium (Nacalai Tesque, Inc.) supplemented with 10% FBS and penicillin/streptomycin was used.

[0445] The cells of Jurkat cell line were seeded at 5×10⁴ cells/well in a 96-well suspension culture plate, and then various wild-type DcR3 controls or DcR3 variants were added at the final concentration of 0.01, 0.1 or 1 μg/mL. Thereafter, recombinant human His6 Fas Ligand (Cell Signaling Technology Japan, K. K.) was added at the final concentration of 0.1 μg/mL so that the total amount of the culture solution was adjusted to 100 μL/well. After culture in a 5% CO2 incubator at 37° C. overnight, CellTiter-Glo (Promega Corporation) was added at 100 μL/well in a Jurkat culture plate, and using a luminometer (Veritas, Promega Corporation), the viable cell count using the production amount of ATP as an index was measured.

[0446] As a result of the measurement, it was confirmed that, in each of the various DcR3 variants, the production amount of ATP derived from viable cells is concentration-dependently increased, and the neutralizing activity to FasL is exhibited (FIG. 11)

### [Example 10] Neutralizing Activity and Binding Activity of Variant with Lowered FasL Binding Activity to Ligand

[0447] Based on chimera A-Fc (g4PEK), one-amino-acid substitutes that have binding and neutralizing activities to TL1A and LIGHT of DcR3 ligands, but have low binding and neutralizing activities to FasL of DcR3 ligands were produced and evaluated. Variants were produced by substituting an appropriately-selected amino acid of CRD2 or CRD3 with Ala or an amino acid other than Ala as shown in Table 13, and the neutralizing activities to DcR3 ligands were measured by the same method as in Example 9. As a result, the neutralizing activities to FasL were selectively lowered in one-amino-acid substitutes, i.e., chimera A-E57K-Fc (g4PEK) (amino acid sequence: SEQ ID NO: 94, nucleotide sequence of DNA: SEQ ID NO: 93) and chimera A-E57L-Fc (g4PEK) (amino acid sequence: SEQ ID NO: 96, nucleotide sequence of DNA: SEQ ID NO: 95), which were obtained by substituting Glu at position 57 from the N-terminus of chimera A-Fc (g4PEK) with Lys and Leu, respectively, and chimera A-R60K-Fc (g4PEK) (amino acid sequence: SEQ ID NO: 98, nucleotide sequence of DNA: SEQ ID NO: 97), which was obtained by substituting Arg at position 60 with Lys (Table 13).

[0448] Regarding each of the variants exhibiting the selectively-lowered neutralizing activities to FasL, i.e., chimera A-E57K-Fc (g4PEK) (SEQ ID NO: 94), chimera A-E57L-Fc (g4PEK) (SEQ ID NO: 96) and chimera A-R60K-Fc (g4PEK) (SEQ ID NO: 98), the binding activities to DcR3 ligands were measured by the same method as in Example 7. As a result, in each of the variants of chimera A-E57K-Fc (g4PEK), chimera A-E57L-Fc (g4PEK) and chimera A-R60K-Fc (g4PEK), only the binding activity to FasL was remarkably lowered, and the binding activities to TL1A and LIGHT were maintained (FIG. 12A, B, C).

TABLE 13
Neutralizing activity of Variant with lowered FasL binding activity

| | | | hLIGHT | hTL1A | hFasL |
|---|---|---|---|---|---|
| Chimera A | | | +++ | +++ | +++ |
| FasL | P45 | A | ++ | ++ | ++ |
| mutant | P46 | A | +++ | +++ | +++ |
| | R47 | A | ++ | ++ | +++ |
| | H48 | A | − | + | − |
| | | K | − | + | − |
| | | Y | + | + | ++ |
| | Y49 | A | − | ++ | − |
| | T50 | A | + | ++ | ++ |
| | Q51 | A | +++ | +++ | +++ |
| | F52 | A | − | − | + |
| | | K | + | − | − |
| | | Y | +++ | +++ | +++ |
| | W53 | A | + | + | + |
| | N54 | A* | − | + | − |
| | Y55 | A | − | + | ++ |
| | | F | ++ | +++ | ++ |
| | | K | − | ++ | + |
| | | L | + | ++ | ++ |
| | L56 | A | + | +++ | ++ |
| | E57 | A | +++ | +++ | ++ |
| | | D | +++ | +++ | +++ |
| | | K | +++ | +++ | + |
| | | L | +++ | +++ | + |
| | R58 | A | +++ | +++ | +++ |
| | R60 | A | − | − | − |
| | | K | − | ++ | − |
| | | D | − | − | − |
| | | L | +++ | +++ | +++ |
| | | W | + | + | ++ |
| | Y61 | A | − | − | − |
| | | F | ++ | +++ | ++ |
| | | K | − | − | − |
| | | L | + | − | − |
| FasL | N63 | A | ++ | + | + |
| mutant | | Q | + | ++ | ++ |
| | | K | − | − | + |
| | | D | − | − | − |
| | | L | − | + | + |
| | | M | + | + | + |
| | | T | + | + | + |
| | V64 | A | + | + | ++ |
| | | D | − | − | − |
| | L65 | A | + | ++ | +++ |
| | G67 | A | +++ | +++ | +++ |
| | E68 | A | ++ | +++ | +++ |
| | R69 | A | +++ | +++ | +++ |
| | | W | +++ | +++ | +++ |
| | | K | +++ | +++ | +++ |
| | E70 | A | + | ++ | + |
| | | D | − | ++ | + |
| | E71 | A | + | + | + |
| | | D | ++ | +++ | +++ |
| | F90 | A | + | + | + |
| | F91 | A | + | + | + |
| | A92 | S | +++ | +++ | +++ |
| | H93 | A | ++ | +++ | +++ |
| | H94 | S | +++ | +++ | +++ |
| | G95 | A | + | ++ | ++ |
| | | L | + | +++ | + |
| | F96 | A | + | ++ | + |
| | | S | − | ++ | + |
| | | L | ++ | ++ | ++ |
| | | Y | + | +++ | ++ |
| | | M | +++ | +++ | ++ |
| | L98 | A | + | ++ | ++ |
| | | S | + | ++ | ++ |
| | | F | + | +++ | +++ |
| | | M | ++ | +++ | +++ |
| | E99 | A | +++ | +++ | +++ |
| | H100 | A | +++ | +++ | +++ |
| | A101 | S | +++ | +++ | +++ |

*Aggregation
+++: Completely neutralize if a 10-fold higher mass concentration (μg/mL) than that of a ligand is added.
++: Completely neutralize if a 100-fold higher mass concentration (μg/mL) than that of a ligand is added.
+: Not completely neutralize even if a 100-fold higher mass concentration (μg/mL) than that of a ligand is added.
−: No neutralizing activity

### [Example 11] Evaluation of Aggregability of Commercially Available Wild-Type DcR3 in Mammalian Cell

[0449] By the same method as in Example 1, commercially available full-length DcR3-Fc (Abcam plc.) produced using HEK293 cells as host cells, commercially available full-length DcR3-Fc (AdipoGen Life Sciences, Inc.) produced using CHO cells as host cells, and a commercially available Fc fusion (Enzo Life Sciences, Inc.) of a DcR3 molecule lacking about half of the C-terminal side of HBD produced using HEK293 cells as host cells were electrophoresed under reducing conditions and non-reducing conditions. The molecular weights of monomers expected from the mobilities under reducing conditions were about 50 kDa to 60 kDa, while the mobilities under non-reducing conditions were greatly higher than the molecular weights of dimers expected, and all of the commercially available products mostly existed as aggregates (FIG. 13).

### [Example 12] Production of Variant with Lowered FasL Binding Activity

[0450] In order to select variants that bind to TL1A and LIGHT among DcR3 ligands and have the selectively-lowered binding activity to FasL, one-amino-acid substitutes (E57X; X is any amino acid other than Glu) were produced by introducing substitution of Glu at position 57 (E57) from the N-terminus with an amino acid other than Glu into chimera A-Fc (g4PEK) (SEQ ID NO: 82). Regarding E57K, E57L, E57R and E57V (which correspond to substitution of E57 with Lys, Leu, Arg and Val, respectively), Fc (g4PEK) fusions each including a two-amino-acid substitute (E57X_W53Z, E57X_N54Z, E57X_Y55Z, E57X_L56Z, E57X_R58Z; a variant number shown in FIG. 14A is imparted to each two-amino-acid substitute) were produced by introducing in addition to one of E57K, E57L, E57R and E57V, one of further substitution of Trp at position 53 (W53) from the N-terminus, Asn at position 54 (N54) from the N-terminus, Tyr at position 55 (Y55) from the N-terminus, Leu at position 56 (L56) from the N-terminus, and Arg at position 58 (R58) from the N-terminus, which are amino acids in the vicinity of E57K, E57L, E57R and E57V, with a certain amino acid Z (Z is selected from Asp, Glu, Asn, Gln, Pro, Thr and Gly) into chimera A-Fc (g4PEK) (SEQ ID NO: 82).

[0451] Of these, regarding chimera A-E57K (amino acid sequence: SEQ ID NO: 66, nucleotide sequence of DNA: SEQ ID NO: 65), chimera A-E57R (amino acid sequence: SEQ ID NO: 180, nucleotide sequence of DNA: SEQ ID NO: 179), chimera A-E57V (amino acid sequence: SEQ ID NO: 182, nucleotide sequence of DNA: SEQ ID NO: 181), chimera A-E57K R58D (variant number: 45-10, amino acid sequence: SEQ ID NO: 184, nucleotide sequence of DNA: SEQ ID NO: 183), chimera A-E57K_R58E (variant number: 45-18, amino acid sequence: SEQ ID NO: 186, nucleotide sequence of DNA: SEQ ID NO: 185) and chimera A, fusions with some of various mutation-introduced Fc sequences shown in Table 14 were produced (nucleotide sequence: SEQ ID NO: 213, 217, 219, 221, 223, 227, 231, 233, 235, 237, 255, 259, 261, 263, 265, 149, 167, 169, 171, 173, 175, 177, amino acid sequence: SEQ ID NO: 214, 218, 220, 222, 224, 228, 232, 234, 236, 238, 256, 260, 262, 264, 266, 317, 319, 320, 321, 322, 324, 326, 327, 328, 329, 331, 333, 334, 335, 336, 150, 168, 170, 172, 174, 176, 178). In Table 14, E216 represents Glu at EU-index position 216 of a human IgG1 heavy chain. As mutation-introduced sites, C220S, M252Y, S254T, T256E, N434A, L234A, L235A and G237A represent substitution of Cys at EU-index position 220 of a human IgG1 heavy chain with Ser, substitution of Met at EU-index position 252 of the human IgG1 heavy chain with Tyr, substitution of Ser at EU-index position 254 of the human IgG1 heavy chain with Thr, substitution of Thr at EU-index position 256 of the human IgG1 heavy chain with Glu, substitution of Asn at EU-index position 434 of the human IgG1 heavy chain with Ala, substitution of Leu at EU-index position 234 of the human IgG1 heavy chain with Ala, substitution of Leu at EU-index position 235 of the human IgG1 heavy chain with Ala, and substitution of Gly at EU-index position 237 of the human IgG1 heavy chain with Ala, respectively.

TABLE 14

| | | Mutation introduced | |
|---|---|---|---|
| Fc name | E216 | site | SEQ ID NO |
| Eg1S | Include | C220S | 156 |
| Eg1S YTE | Include | C220S, M252Y, S254T, | 158 |
| | | T256E | |
| Eg1S N434A | Include | C220S, N434A | 160 |
| Eg1S LALAGANA | Include | C220S, L234A, L235A, | 166 |
| | | G237A, N434A | |
| Eg1S LALAGA | Include | C220S, L234A, L235A, | 164 |
| | | G237A | |
| g1S | Not | C220S | 72 |
| | include | | |
| g1S YTE | Not | C220S, M252Y, S254T, | 311 |
| | include | T256E | |
| g1S N434A | Not | C220S, N434A | 312 |
| | include | | |
| g1S LALAGANA | Not | C220S, L234A, L235A, | 313 |
| | include | G237A, N434A | |
| g1S LALAGA | Not | C220S, L234A, L235A, | 162 |
| | include | G237A | |

[0452] Regarding chimera A-Fc (g1S) (nucleotide sequence: SEQ ID NO: 149, amino acid sequence: SEQ ID NO: 150), a variant obtained by deleting the IEGRMD sequence from chimera A-Fc (IEGRMD g1S) (SEQ ID NO: 80) including a linker sequence IEGRMD (SEQ ID NO: 106), produced in Example 2, was produced by stable expression in CHO cells using the method mentioned in Example 6. Regarding chimera A-Fc (Eg1S) (nucleotide sequence: SEQ ID NO: 167, amino acid sequence: SEQ ID NO: 168), a sequence obtained by linking chimera A (SEQ ID NO: 54) and Eg1S to each other was produced by stable expression in CHO cells by the method mentioned in Example 6.

[0453] Regarding each of the chimera A-Fc variants (Eg1S YTE, Eg1S N434A, Eg1S LALAGA, Eg1S LALAGANA) (nucleotide sequence: SEQ ID NO: 169, 171, 175, 177, amino acid sequence: SEQ ID NO: 170, 172, 176, 178), a sequence obtained by fusing each Fc to the C-terminus of chimera A (SEQ ID NO: 54) was obtained by transient expression in CHO—S cells.

[0454] Regarding each of the chimera A-Fc variants (g1S YTE, g1S N434A, g1S LALAGA, g1S LALAGANA) (amino acid sequence: SEQ ID NO: 314, 315, 174, 316), a sequence obtained by fusing each Fc to the C-terminus of chimera A (SEQ ID NO: 54) was obtained by transient expression in Expi293 cells.

[0455] A plasmid expressing a fusion of each amino acid substitute and Fc (g4PEK) was produced as follows: using a DNA sequence of either chimera A-Fc (g4PEK) or E57X-Fc (g4PEK; X is K, R or V) as a template, and using a PCR primer designed to include a mutation site, two regions of a region from an Nhel site to a site into which an amino acid substitution was introduced and a region from the site into which an amino acid substitution was introduced to an Sall site each were subjected to PCR amplification, and the resultant products were inserted under a CMV promoter of a pClpuro vector by the same method as in Example 1.

[0456] Regarding a plasmid expressing a fusion of each amino acid substitute and each Fc of Eg1S YTE, Eg1S N434A or Eg1S LALAGANA, using a DNA sequence encoding one of chimera A-Fc variants including the respective mutated Fc sequences as a template, and using a PCR primer designed to include a mutation site, each of two regions, i.e., a region extending from an EcoRI site to a site into which an amino acid substitution was introduced and a region extending from the site into which an amino acid substitution was introduced to a Bsu36I site was subjected to PCR amplification, and each of the resultant products was inserted into the EcoRI and Bsu36I sites of the chimera A-Fc vector including the mutated Fc sequence used as a template to produce the plasmid.

[0457] Regarding a plasmid expressing a fusion of each amino acid substitute and each Fc of g1S YTE, g1S N434A or g1S LALAGANA, using a DNA sequence encoding one of the abovementioned amino acid substitute-Fc variants as a template, and using a PCR primer designed to exclude E216, each of two regions, i.e., a region extending from an EcoRI site to a site of Glu to be deleted and a region extending from the site of Glu to be deleted to a Bsu36I site was subjected to PCR amplification, and each of the resultant products was inserted into the EcoRI and Bsu36I sites of the amino acid substitute-Fc vector used as a template to produce the plasmid.

[0458] Each plasmid was introduced into Expi293 cells to transiently express, and affinity purification from the culture supernatant was performed by MabSelect SuRe. Each content of monomers, aggregates and degradants of the chimera A-Fc variants, the one-amino-acid substitute-Fc variants and the two-amino-acid substitute-Fc variants produced was calculated from the peak areas analyzed by SEC-UPLC (ACQUITY UPLC Protein BEH SEC 4.6 mm×150 mm) (Waters K. K.) or SEC-HPLC (TSKgel SuperSW3000 4.0 μm, 4.6 mm×300 mm) (Tosoh Corporation) using the same method as in Example 2.

[0459] As a result, many of the chimera A-Fc variants, the one-amino-acid substitute-Fc variants and the two-amino-acid substitute-Fc variants produced, regardless of mutated Fc sequences, maintained lower aggregate contents than that of S195-Fc (FIG. 14A, B, C).

### [Example 13] Evaluation of Binding Activity to DcR3 Soluble Trimer Ligand

[0460] Regarding each of DcR3-Fc, S195-Fc, the various chimera A-Fc variants including different Fc sequences and the various variants with lowered FasL binding activities produced in Example 12, the binding activities to a soluble human LIGHT trimer, a soluble human TL1A trimer and a soluble human FasL trimer were evaluated by partially modifying the method mentioned in Example 7.

### (1) Production of DcR3 Soluble Trimer Ligand

[0461] As a human soluble recombinant LIGHT, a sequence (FLAG-LIGHT) obtained by adding a FLAG tag (DYKDDDDK) to the N-terminus and linking an extracellular region (Asp74-Va1240) (SEQ ID NO: 132) of LIGHT to downstream thereof was used (nucleotide sequence: SEQ ID NO: 305, amino acid sequence: SEQ ID NO: 306). As a human soluble recombinant TL1A, a sequence (His6-TL1A) obtained by adding a His tag (His6) and a GS linker (GGGSGGGSGGGS) to the N-terminus and linking an extracellular region (Leu72-Leu251) (SEQ ID NO: 138) of TL1A to downstream thereof was used (nucleotide sequence: SEQ ID NO: 115, amino acid sequence: SEQ ID NO: 116). Each plasmid was produced by the same method as in Example 7, and transient expression by Expi293 cells was performed.

[0462] FLAG-LIGHT was purified using ANTI-FLAG M2 Affinity Gel (Sigma-Aldrich Co. LLC). The culture supernatant was passed through a column filled with a resin, washed with a washing buffer (50 mM Tris HCl, 150 mM NaCl, pH 7.4), and eluted with an eluent (0.1M glycine hydrochloride, pH 3.5).

[0463] His6-TL1A was purified by the following method. The culture supernatant was passed through a column filled with Complete His-Tag Purification Resin (Roche), washed with a washing buffer (50 mM NaH₂PO₄ pH 8.0, 300 mM NaCl), and eluted with an eluent (50 mM NaH₂PO₄ pH 8.0, 300 mM NaCl, 250 mM imidazole). The eluent substituted with PBS using a NAP column (GE Healthcare), passed through a column filled with Ni Sepharose Fast Flow resin (GE Healthcare), washed with a washing buffer (60 mM imidazole, 20 mM sodium phosphate, 0.5 M NaCl, pH 7.4) prepared using His Buffer Kit (GE Healthcare), and eluted with an elution buffer (250 mM imidazole, 20 mM sodium phosphate, 0.5 M NaCl, pH 7.4).

[0464] Each elution buffer of elution fractions of FLAG-LIGHT and His6-TL1A was substituted with PBS using a NAP column (GE Healthcare) and passed through a 0.22 μm filter to perform sterilization. The purified proteins thus obtained were subjected to gel filtration chromatography (SEC) (TSKgel G3000 SWXL 7.8 mm×300 mm) (Tosoh Corporation) using HPLC (Shimadzu Corporation) to collect trimer fractions.

[0465] As a human soluble recombinant FasL, Human His6 Fas Ligand/TNFSF6 (Cell Signaling Technology, Inc.) obtained by adding a His tag (His6) to the N-terminus and linking an extracellular region (Pro134-Leu281) (SEQ ID NO: 144) of FasL to downstream thereof was used. SEC-MALS was performed by the same method as in Example 2 to confirm it was a trimer.

### (2) Measurement of Binding Activity Using BIAcore

[0466] Regarding both of DcR3-Fc (R&D Systems, Inc.) and 5195-Fc, those mentioned in Example 7 were evaluated. Chimera A-g4PEK (SEQ ID NO: 82) was produced in Example 6. Chimera A-Fc (g1S, Eg1S) was produced in Example 12. As various variants with lowered FasL binding activities, the Fc (g4PEK) fusions produced in Example 9 or Example 12 were evaluated.

[0467] The binding activities to human DcR3 trimer ligands were analyzed by the SPR method. BIAcore T-100 (GE Healthcare) was used for measurement of the binding activities to human LIGHT and human TL1A, and BIAcore T-100 (GE Healthcare) or BIAcore T-200 (GE Healthcare) was used for measurement of the binding activity to human FasL. As the buffer, HBS-EP+Buffer was used.

[0468] After 10,000 RU of anti-human antibodies were immobilized to Series S Sensor Chip CM5 using Human Antibody Capture Kit (both of which are manufactured by GE Healthcare), various wild-type DcR3 controls and DcR3 variants were injected at the flow rate of 10 μL/min for 30 seconds and captured. Meanwhile, the buffer containing no protein was injected into a reference flow cell. Thereafter, as an analyte, each human DcR3 trimer ligand diluted to 0.02 to 80 nmol/L was injected at 30 μL/min for 2 minutes to monitor the binding, and subsequently the buffer was injected for 3 minutes to monitor dissociation. Then, 3 mol/L magnesium chloride was injected at 30 μL/min for 1 minute to perform a regeneration reaction. For measurement of the binding activities to human LIGHT and human TL1A, BIAcore T-100 evaluation software and 1:1 Binding model were used, and by regarding each ligand as a trimer (human LIGHT trimer: 62.4 kDa, human TL1A trimer: 66.2 kDa), each kinetic constant (kₐ, k_{d}, K_{D}) was calculated. For measurement of the binding activity to human FasL, BIAcore T-100 evaluation software and 1:1 Binding model or BIAcore T-200 evaluation software and 1:1 Binding model were used, and by regarding the ligand as a monomer (human FasL monomer: 19.8 kDa), each kinetic constant (kₐ, k_{d}, K_{D}) was calculated.

[0469] As a result, it was confirmed that each of chimera A-Fc (g1S), chimera A-Fc (Eg1S) and chimera A-Fc (g4PEK) binds to each DcR3 trimer ligand (FIG. 15A).

[0470] Of the variants (g4PEK) with lowered FasL binding activities produced in Example 12, in each of the one-amino-acid substitutes, i.e., chimera A-E57K-Fc (g4PEK) (amino acid sequence: SEQ ID NO: 94, nucleotide sequence of DNA: SEQ ID NO: 93) (hereinafter sometimes referred to as “E57K-Fc”), chimera A-E57L-Fc (g4PEK) (amino acid sequence: SEQ ID NO: 96, nucleotide sequence of DNA: SEQ ID NO: 95) (hereinafter sometimes referred to as “E57L-Fc”), chimera A-E57R-Fc (g4PEK) (amino acid sequence: SEQ ID NO: 190, nucleotide sequence of DNA: SEQ ID NO: 189) (hereinafter sometimes referred to as “E57R-Fc”), chimera A-E57V-Fc (g4PEK) (amino acid sequence: SEQ ID NO: 192, nucleotide sequence of DNA: SEQ ID NO: 191) (hereinafter sometimes referred to as “E57V-Fc”), chimera A-E57A-Fc (g4PEK) (amino acid sequence: SEQ ID NO: 288, nucleotide sequence of DNA: SEQ ID NO: 287) (hereinafter sometimes referred to as “E57A-Fc”), chimera A-E57F-Fc (g4PEK) (amino acid sequence: SEQ ID NO: 290, nucleotide sequence of DNA: SEQ ID NO: 289) (hereinafter sometimes referred to as “E57F-Fc”), chimera A-E57H-Fc (g4PEK) (amino acid sequence: SEQ ID NO: 292, nucleotide sequence of DNA: SEQ ID NO: 291) (hereinafter sometimes referred to as “E57H-Fc”), chimera A-E57I-Fc (g4PEK) (amino acid sequence: SEQ ID NO: 294, nucleotide sequence of DNA: SEQ ID NO: 293) (hereinafter sometimes referred to as “E57I-Fc”), and chimera A-E57M-Fc (g4PEK) (amino acid sequence: SEQ ID NO: 296, nucleotide sequence of DNA: SEQ ID NO: 295) (hereinafter sometimes referred to as “E57M-Fc”), and in each of the two-amino-acid substitutes, i.e., chimera A-E57K_R58D-Fc (g4PEK) (variant number: 45-10, amino acid sequence: SEQ ID NO: 194, nucleotide sequence of DNA: SEQ ID NO: 193) (hereinafter sometimes referred to as “45-10-Fc”), chimera A-E57K_R58T-Fc (g4PEK) (variant number: 45-11, amino acid sequence: SEQ ID NO: 298, nucleotide sequence of DNA: SEQ ID NO: 297) (hereinafter sometimes referred to as “45-11-Fc”), chimera A-E57K_R58E-Fc (g4PEK) (variant number: 45-18, amino acid sequence: SEQ ID NO: 196, nucleotide sequence of DNA: SEQ ID NO: 195) (hereinafter sometimes referred to as “45-18-Fc”), chimera A-E57L_R58E-Fc (g4PEK) (variant number: 46-4, amino acid sequence: SEQ ID NO: 300, nucleotide sequence of DNA: SEQ ID NO: 299) (hereinafter sometimes referred to as “46-4-Fc”), chimera A-E57R_R58D-Fc (g4PEK) (variant number: 82-5, amino acid sequence: SEQ ID NO: 198, nucleotide sequence of DNA: SEQ ID NO: 197) (hereinafter sometimes referred to as “82-5-Fc”), chimera A-E57V_R58T-Fc (g4PEK) (variant number: 85-6, amino acid sequence: SEQ ID NO: 302, nucleotide sequence of DNA: SEQ ID NO: 301) (hereinafter sometimes referred to as “85-6-Fc”), and chimera A-E57V_R58E-Fc (g4PEK) (variant number: 85-8, amino acid sequence: SEQ ID NO: 304, nucleotide sequence of DNA: SEQ ID NO: 303) (hereinafter sometimes referred to as “85-8-Fc”), it was confirmed that the K_{D} values to LIGHT trimer and TL1A trimer were less than 3-fold and the K_{D} value to FasL trimer was 3-fold or more or the Rmax value was decreased to less than 5, compared to those of chimera A-Fc (g4PEK), and that the binding activity to FasL was selectively lowered (FIG. 16A, B).

[0471] Of these, E57K-Fc, E57L-Fc, E57R-Fc, E57V-Fc, 45-10-Fc, 45-18-Fc and 82-5-Fc (each having g4PEK as an Fc) were purified to 95% or more of monomers by SEC-HPLC (column; TSKgel G3000 SWXL 7.8 mm×300 mm, Tosoh Corporation, HPLC; Shimadzu Corporation) and subjected to BIAcore measurement, and each kinetic constant is shown in FIG. 15B.

### [Example 14] Evaluation of Neutralizing Activity to DcR3 Soluble Ligand

[0472] The neutralizing activities of various DcR3 variants to soluble human LIGHT, soluble human TL1A and soluble human FasL were evaluated by partially modifying the method mentioned in Example 9.

### (1) Production of Various Chimera A-Fc Variants Including Different Fc Sequences

[0473] The chimera A-Fc variants (g1S, Eg1S) produced in Example 12 were used. The chimera A-Fc variants produced in Example 12, each including chimera A and an Fc fused to the C-terminal side of chimera A selected from Eg1S YTE, Eg1S N434A, Eg1S LALAGA and Eg1S LALAGANA shown in Table 14, were produced by transient expression in CHO—S cells, and purified to 95% or more of monomers by SEC (Superdex 200 Increase 10/300 GL) (GE Healthcare) using AKTApurifier (GE Healthcare) for use.

### (2) Neutralizing Activity to Soluble Human LIGHT

[0474] Regarding each of the chimera A-Fc variants (g1S, Eg1S, Eg1S YTE, Eg1S N434A, Eg1S LALAGA, Eg1S LALAGANA, g4PEK), the inhibitory activity to LIGHT-dependent CXCL10 production from an IFN-γ-stimulated intestinal myofibroblast (Lonza K. K.) was evaluated. The intestinal myofibroblast was cultured in a collagen I-coated flask (Becton, Dickinson and Company) using an SmGM-2 Bullet Kit (Lonza K. K.) medium. After the cells were seeded at 1×10⁴ cells/well in a collagen I-coated 96-well plate (Becton, Dickinson and Company), IFN-γ at the final concentration of 10 ng/mL, the trimer FLAG-LIGHT produced in Example 13 at the final concentration of 20 ng/mL, and various DcR3 variants at each final concentration of 19.5, 78.1, 313, 1,250, 5,000, 20,000 ng/mL, or 4.88, 19.5, 78.1, 313, 1,250, 5,000 ng/mL were added, followed by culture for 3 days. The culture supernatants were collected, and the CXCL10 concentrations in the culture supernatants were measured using CXCL10/IP-10 (human) AlphaLisa Detection Kit (PerkinElmer, Inc.). As a result, it was confirmed that each of the chimera A-Fc variants, regardless of an Fc sequence, concentration-dependently inhibits the CXCL10 production and has neutralizing activity to soluble LIGHT (FIG. 17A, B).

[0475] Regarding each of the variants with lowered FasL binding activities, i.e., E57K-Fc, E57L-Fc, E57R-Fc and E57V-Fc (each including g4PEK as an Fc), the inhibitory activity to LIGHT-dependent IL-8 production from HT-29 cells was evaluated by the same method as in Example 9. As a result, it was confirmed that each of the variants concentration-dependently inhibits the IL-8 production and has neutralizing activity to soluble LIGHT (FIG. 17C).

[0476] Regarding each of the variants with lowered FasL binding activities, i.e., 45-10-Fc, 45-18-Fc and 82-5-Fc (each including g4PEK as an Fc), similarly to chimera A-Fc, the inhibitory activity to LIGHT-dependent CXCL10 production from an IFN-γ-stimulated intestinal myofibroblast was evaluated under the conditions of 2×10⁴ of intestinal myofibroblast per well, and final concentration of 19.5, 78.1, 313, 1,250, 5,000 or 20,000 ng/mL of each test substance. As a result, it was confirmed that each of the variants concentration-dependently inhibits the CXCL10 production and has neutralizing activity to soluble LIGHT (FIG. 17D).

### (3) Neutralizing Activity to Soluble Human TL1A

[0477] Regarding each of the DcR3 variants, the inhibitory activity to TL1A-dependent IFN-γ production from IL-12- and IL-18-stimulated human T cells was evaluated by the same method as in Example 9. As a result, it was confirmed that, each of the chimera A-Fc variants, regardless of an Fc sequence, concentration-dependently inhibits the production amount of IFN-γ and has neutralizing activity to soluble TL1A (FIG. 18A, B). Furthermore, it was also confirmed that each of the variants with lowered FasL binding activities, i.e., E57K-Fc, E57L-Fc, E57R-Fc, E57V-Fc, 45-10-Fc, 45-18-Fc and 82-5-Fc (each including g4PEK as an Fc) similarly has neutralizing activity to soluble TL1A (FIG. 18C, D).

### (4) Neutralizing Activity to Soluble Human FasL

[0478] Regarding each of the DcR3 variants, the inhibitory activity to FasL-dependent cell death of Jurkat cells or A3 cells corresponding to a Jurkat subclone was evaluated by the same method as in Example 9. As a result, it was confirmed that each of the chimera A-Fc variants, regardless of an Fc sequence, concentration-dependently inhibits cell death of A3 cells and has neutralizing activity to soluble FasL (FIG. 19A, B). Meanwhile, regarding each of the variants with lowered FasL binding activities, i.e., E57K-Fc, E57L-Fc, E57R-Fc, E57V-Fc, 45-10-Fc, 45-18-Fc and 82-5-Fc (each including g4PEK as an Fc), it was confirmed that, in each of the variants, the inhibitory activity to Jurkat cell death was remarkably decreased and the neutralizing activity to soluble FasL was selectively lowered (FIG. 19C, D).

### [Example 15] Evaluation of Binding Activity to Membrane-bound DcR3 Ligand

[0479] The binding activities of various DcR3 variants to membrane-bound human LIGHT, membrane-bound human TL1A and membrane-bound human FasL were evaluated by flow cytometry using membrane-bound ligand forced expression cell lines. As the membrane-bound human LIGHT forced expression HEK293 cells, those mentioned in U.S. Pat. No. 8,974,787 were used. Regarding each of membrane-bound TL1A and membrane-bound FasL, using a commercially available ORF clone (Origene Technologies, Inc.) thereof as a template, a sequence obtained by adding a Met residue and a FLAG tag (DYKDDDDK) to the N-terminus was subjected to PCR amplification (nucleotide sequence: SEQ ID NO: 307, 309, amino acid sequence: SEQ ID NO: 308, 310), and the resultant product was inserted into downstream of a CMV promoter of a pClpuro vector using In-Fusion HD Cloning Kit (Clontech Laboratories, Inc.), and Escherichia co/i DH5a competent cells (TOYOBO CO., LTD.) were transformed.

[0480] The plasmids thus obtained were introduced into CHO-K1 cells (ECACC) using Nucleofector and Cell Line Nucleofector Kit T (both of which are manufactured by Lonza K. K.), and subjected to drug selection by 10 μg/mL of Puromycin (Thermo Fisher Scientific, Inc.). The drug-resistant cells thus obtained were stained with a DyLight488-labeled anti-human TL1A antibody (Novus Biologicals, LLC) or an APC-labeled anti-human FasL antibody (BD Pharmingen), and high expression fractions were sorted using a cell sorter (Sony Corporation). After expansion culture, the cells were stained with a PE-labeled anti-human TL1A antibody (Novus Biologicals, LLC) or a PE-labeled anti-human FasL antibody (BioLegend, Inc.), followed by sorting again, thus obtaining a membrane-bound human TL1A or membrane-bound human FasL high expression cell line.

[0481] The binding activities of various DcR3 variants to membrane-bound ligand forced expression cell lines and host cells were evaluated using the same method as in Example 5 by changing the following conditions. Regarding HEK293 and a membrane-bound LIGHT forced expression cell line, 1 μg/mL of each protein and 10 ng/mL of a secondary antibody Goat F(ab′)2 Anti-Human IgG R-phycoerythrin Conjugate (Southern Biotechnology Associates, Inc.) were reacted. Regarding membrane-bound TL1A and a membrane-bound FasL forced expression cell line, 1 or 10 μg/mL of each protein and 0.1 or 1 μg/mL of the secondary antibody each were reacted.

[0482] As a result, each of the chimera A-Fc variants (g1S, Eg1S, g4PEK) did not react with 293 or CHO-K1 cells used as host cells, but reacted specifically with each cell of membrane-bound ligand forced expression cell line. Therefore, it was confirmed that each of the various chimera A variants including different Fc sequences has binding activities to membrane-bound DcR3 ligands (FIG. 20A, B). Furthermore, regarding each of the variants with lowered FasL binding activities, i.e., E57K-Fc, E57L-Fc, E57R-Fc, E57V-Fc, 45-10-Fc, 45-18-Fc and 82-5-Fc (each including g4PEK as an Fc), the binding activities to ligands were similarly evaluated, and as a result, it was confirmed that the binding activities to membrane-bound human LIGHT and membrane-bound human TL1A were maintained, while the binding activity to membrane-bound human FasL was remarkably decreased except for E57L (FIG. 21A, B, C).

### [Example 16] Evaluation of Binding Activity to DcR3 Primary Ligand

[0483] The binding activities of various DcR3 variants to each DcR3 ligand derived from a primary cell were evaluated by the following method.

### (1) Binding Activity to Primary LIGHT

[0484] It has been known that expression of membrane-bound LIGHT is induced in activated human T cells (The Journal of Immunology, 2004, 173: p.502-507.). Frozen healthy individual PBMCs (AlICells, LLC) were thawed, and stimulated with PMA (Sigma-Aldrich Co. LLC) at a final concentration of 50 ng/mL and ionomycin (Sigma-Aldrich Co. LLC) at 1 μg/mL overnight, and then the binding of chimera A-Fc (Eg1S) to membrane-bound LIGHT, expression of which was induced in CD3-positive T cells, was evaluated by the following method. As a negative control, the anti-DNP antibody (IgG1) mentioned in Example 8 was used. The stimulated PBMCs were collected and reacted using Human FcR Blocking Reagent (Miltenyi Biotec B. V. & Co. KG), and then a BV421-labeled CD3 antibody (BD Pharmingen), 7-AAD Staining Solution (BD Pharmingen) and chimera A-Fc or anti-DNP antibody at a final concentration of 0.4 μg/mL labeled with Alexa Fluor488 Antibody Labeling Kit (Thermo Scientific) each were added. After reaction, washing was performed, and the fluorescence intensities of Alexa Fluor488 in CD3-positive T cells of viable cell fractions were analyzed with a flow cytometer. For confirmation of expression of membrane-bound LIGHT in the PBMCs stimulated for induction, the PBMCs stimulated for induction were reacted using Human FcR Blocking Reagent (Miltenyi Biotec B. V. & Co. KG), and then a BV510-labeled CD3 antibody (BioLegend, Inc.), 7-AAD Staining Solution (BD Pharmingen) and a PE-labeled LIGHT antibody (LifeSpan BioSciences, Inc.) or a PE-labeled mouse IgG1K isotype control antibody (BioLegend, Inc.) each were added. After reaction, washing was performed, and the fluorescence intensities of PE in CD3-positive T cells of viable cell fractions were analyzed with a flow cytometer.

[0485] As a result, it was confirmed that expression of LIGHT is induced on CD3-positive human T cells in PBMCs stimulated for induction, and that Alexa Fluor488-labeled chimera A-Fc binds to membrane-bound LIGHT on activated CD3-positive human T cells (FIG. 22A, B).

### (2) Binding Activity to Primary TL1A

[0486] HUVECs (Lonza K. K.) cultured by the same method as in Example 5 were treated with Recombinant Human IL-1 alpha (R&D Systems, Inc.) at a final concentration of 10 ng/mL and a TACE inhibitor TAPI-1 (Calbiochem) at a final concentration of 20 pM for 24 hours, and the binding of chimera A-Fc (IEGRMD g1S) to membrane-bound TL1A, expression of which was induced, was evaluated by a competition experiment with a TL1A antibody 1D1 1.31 (US2015/0132311). As the TL1A antibody 1D1 1.31, an antibody obtained by linking the amino acid sequences of VL and VH mentioned in US 2015/0132311 to a constant region of human IgG1, followed by transient expression using Expi293 cells and purification using Mabselect SuRe (GE Healthcare) from the culture supernatant by the method mentioned in Example 1, was used. As a negative control, the anti-DNP antibody (IgG1) mentioned in Example 8 was used. The collected cells were reacted with Human FcR Blocking Reagent (Miltenyi Biotec B. V. & Co. KG), and then either anti-DNP antibody, chimera A-Fc or TL1A antibody labeled with Zenon Alexa Fluor 647 Human IgG Labeling Kit (Molecular Probes) was added at the final concentration of 8.3 μg/mL. After reaction, washing was performed, and the fluorescence intensities of Alexa Fluor 647 were analyzed with a flow cytometer. Under the competition conditions, either unlabeled DNP antibody, TL1A antibody or chimera A-Fc at a final concentration of 50 μg/mL was reacted in advance.

[0487] As a result, the binding of the labeled chimera A-Fc competed with the unlabeled TL1A antibody and the binding of the labeled TL1A antibody competed with the unlabeled chimera A-Fc, and thus it was confirmed that chimera A binds to membrane-bound TL1A on the stimulated HUVEC (FIG. 23).

### (3) Binding Activity to Primary FasL

[0488] The binding of chimera A-Fc (IEGRMD g1S) to primary soluble FasL produced from human T cells stimulated for activation-induced cell death (AICD) was evaluated by the following method. The primary soluble FasL was prepared by the following method. In other words, human T cells isolated from frozen healthy individual PBMCs by the same method as in Example 9 were seeded at 2×10⁴ cells/well in a 96-well U-bottom plate (Becton, Dickinson and Company), and cultured with PHA-L (eBioscience, Inc.) at a final concentration of 1 μg/mL for 24 hours, and then IL-2 (Peprotech, Inc.) at a final concentration of 1 μg/mL was added to culture for 5 days. After 5 days, the cells were collected and seeded in a 96-well U-bottom plate to which 5 μg/mL of anti-CD3 antibody OKT3 (BioLegend, Inc.) was immobilized. AICD was induced and culture was performed overnight, and then the culture supernatant was collected, and using Amicon Ultra-15 having a molecular weight cutoff of 10 kDa (Merck Millipore) prerinsed with sterile water, the solution volume was concentrated to one-tenth.

[0489] A 96-well immunoplate (Thermo Scientific), to which 10 μg/mL of anti-human IgG antibodies (American Qualex International, Inc.) were immobilized, was blocked with 1% Block Ace (DS Pharma Biomedical Co., Ltd.), and then 20 μg/mL of chimera A-Fc (IEGRMD g1S) or Fas-Fc (R&D Systems, Inc.) was captured. After washing, recombinant FasL (Abcam plc) used as a standard or a 10-fold concentrated AICD culture supernatant was reacted. After washing, a biotinylated anti-FasL antibody (Abcam plc) was reacted. After washing, streptavidin-HRP (PIERCE) was reacted. After washing again, a TMB solution (Abcam plc) was added to develop a color. Then, a 2 N sulfuric acid solution was used to stop the chromogenic reaction, and the absorbance at 450 nm was measured.

[0490] The results for the plate on which chimera A-Fc (IEGRMD g1S) was captured are shown in FIG. 24A, and the results for the plate on which Fas-Fc was captured are shown in FIG. 24B. “CD3” for 10×AICD supernatant refers to use of the culture supernatant of the T cells stimulated for AICD under the anti-CD3 antibody OKT3 stimulation conditions, and “none” for 10×AICD supernatant refers to use of the culture supernatant of the T cells not stimulated for AICD. Also regarding the plate on which any of chimera A-Fc or Fas-Fc was captured, FasL was detected only in the culture supernatant of the T cells stimulated for AICD. The results confirmed that chimera A-Fc binds to soluble FasL produced from the T cells stimulated for AICD (FIG. 24A, B).

### [Example 17] Evaluation of Physical Property of DcR3 Variant

[0491] Regarding various chimera A-Fc variants (g1S, Eg1S, Eg1S YTE, Eg1S N434A, Eg1S LALAGANA, Eg1S LALAGA, g4PEK) and variants with lowered FasL binding activities, i.e., E57K-Fc, E57L-Fc, E57R-Fc, E57V-Fc, 45-10-Fc, 45-18-Fc and 82-5-Fc (each having g4PEK as an Fc), using the same method as in Example 4, the elution times (min) were calculated by hydrophobic interaction chromatography (HIC) and the Tm values (° C.) were calculated by the differential scanning fluorimetry (DSF) method.

[0492] As a result, it was confirmed that introduction of multiple amino acid mutations into an IgG1 Fc sequence does not remarkably affect the hydrophobicity. Since the elution time of any of variants with lowered FasL binding activities did not remarkably differ from that of chimera A-g4PEK, it was confirmed that one-amino-acid or two-amino-acid substitution does not affect the hydrophobicity (FIG. 25).

[0493] Regarding the Tm value by DSF, of amino acid substitution or insertion in an IgG1 Fc sequence, introduction of a YTE mutation affected the thermostability. Since the Tm value for any of variants with lowered FasL binding activities did not remarkably differ from that of chimera A-g4PEK, it was confirmed that introduction of one-amino-acid or two-amino-acid substitution into a part of CRDs of DcR3 does not affect the thermostability (FIG. 26).

### [Example 18] Evaluation of Mouse In Vivo Kinetics of DcR3 Variant

[0494] Regarding chimera A-Fc (Eg1S) and the variants with lowered FasL binding activities, i.e., E57K-Fc, E57L-Fc, E57R-Fc, E57V-Fc, 45-10-Fc, 45-18-Fc and 82-5-Fc (each having g4PEK as an Fc), in vivo kinetics in mice were evaluated by the same method as the method mentioned in Example 6. Chimera A-Fc (Eg1S) was produced by stable expression in CHO-K1 cells and each of the variants with lowered FasL binding activities was produced by transient expression in CHO—S cells, and purified to 95% or more of monomers by SEC (Superdex 200 Increase 10/300 GL) (GE Healthcare) using AKTApurifier (GE Healthcare) for use.

[0495] When single i.v. administration of 10 mg/kg of each DcR3 variant was performed to 5- to 6-week-old BALB/c mice (female) (n=2 or 3), the half-life in blood (h) during the elimination phase and the area under the concentration-time curve to infinity AUCO-∞ (μg*h·mL) after single administration were calculated (FIG. 27). As a standard substance in measurement of the concentration of each DcR3 variant in serum of a mouse to which E57K-Fc, E57R-Fc or E57V-Fc was administered, each DcR3 variant produced by transient expression in Expi293 cells was used.

[0496] As a result, each of the DcR3 variants showed greater improvement in AUC as compared to S195-Fc (IEGRMD g1S) corresponding wild-type DcR3 mentioned in Example 6.

### [Example 19] Evaluation of In Vivo Drug Efficacy of DcR3 Variant

[0497] In vivo drug efficacy of chimera A-Fc (g4PEK) was evaluated in a mouse acute xenogeneic graft versus host disease (GVHD) model.

### (1) Production of Mouse Acute Xenogeneic GVHD Model

[0498] A mouse acute xenogeneic GVHD model was produced by the same method as mentioned in JP 5209625 B2. Using 6-week-old severe combined immunodeficient (SCID) female mice, on days −2 and −5, 100 μg of rat anti-mouse IL2 receptor-β(IL2Rβ) chain antibody TMIβI (Bio X Cell, Inc.) was intraperitoneally injected to deplete endogenous mouse natural killer cells. On day −1, using a CellRad X-ray irradiator (Faxitron), irradiation treatment with a sublethal dose of 1.7 Gy was performed to the mice. On day 0, 3×10⁶ human PBMCs (AlICells, LLC) were intraperitoneally transferred, and subsequently 300 μg of chimera A-Fc or a DNP antibody (both are g4PEK) prepared in 100 μL of PBS was intraperitoneally injected. Regarding the chimera A-Fc administration group, 300 μg of chimera A-Fc was additionally administered on days 4 and 8. After 12 days, gross pathological scores by GVHD reaction were determined, and in addition, spleen was collected from sacrificed mice, and the human cell count in the spleen was evaluated.

### (2) Evaluation of GVHD Pathological Score

[0499] The gross pathological conditions observed on day 12 were scored based on four indices of fur, erythema in the intestinal tract, activity and weight loss (FIG. 28A). Regarding indices, none, mild and severe were scored as 0, 1 and 2, respectively, and by summing the scores of all indices, the GVHD pathological scores were determined.

[0500] As a result, an increase in the GVHD pathological scores by transfer of human PBMCs and a decrease in the pathological scores by administration of chimera A-Fc as compared to the DNP antibody administration group were confirmed, and drug efficacy by chimera A-Fc was observed (FIG. 28B).

### (3) Measurement of Human Cell Count in Spleen

[0501] Mouse spleen was collected, and using gentleMACS Dissociators (Miltenyi Biotec B. V. & Co. KG), the spleen was homogenized to prepare a splenic cell suspension. After a hemolysis treatment with Lysing buffer (BD Biosciences), staining was performed with a PE/Cy7-labeled anti-human CD45 antibody, an FITC-labeled anti-human CD3 antibody, an APC-labeled anti-human CD4 antibody and a PE-labeled anti-human CD8 antibody (all of which are manufactured by BioLegend, Inc.), and each human cell subset was analyzed by a flow cytometry analysis. For measurement of the cell count, CountBright Absolute Counting Beads, for flow cytometry (Thermo Fisher Scientific, Inc.) was used, and the abundance ratio of the fluorescent bead count and each cell subset count detected by flow cytometry was corrected by a known amount of beads added, thus calculating the total cell count in the spleen.

[0502] As a result, by transfer of human PBMCs, human cells were detected in mouse spleen, and it was confirmed that the human cell count in mouse spleen is decreased by administration of chimera A-Fc as compared to the DNP antibody administration group (FIG. 29).

### [Example 20] Evaluation of Binding Activity to Soluble DcR3 Ligand Trimer

[0503] Regarding each of the chimera A-Fc variants and the variants with lowered FasL binding activities including various mutated Fc sequences produced in Example 12, the binding activities to a soluble human LIGHT trimer, a soluble cynomolgus monkey LIGHT trimer, a soluble human TL1A trimer, a soluble cynomolgus monkey TL1A trimer, a soluble human FasL trimer or a soluble cynomolgus monkey FasL trimer were evaluated as follows by partially modifying the methods mentioned in Examples 7 and 13.

### (1) Production of Soluble DcR3 Ligand Trimer

[0504] As human soluble DcR3 ligand trimers, those produced in Example 13 were used. As a cynomolgus monkey soluble recombinant LIGHT, a sequence (FLAG-cynoLIGHT) obtained by adding a FLAG tag (DYKDDDDK) to the N-terminus and linking an extracellular region (Asp74-Va1240) (SEQ ID NO: 134) of cynomolgus monkey LIGHT to downstream thereof was used (nucleotide sequence: SEQ ID NO: 341, amino acid sequence: SEQ ID NO: 342). As a cynomolgus monkey soluble recombinant TL1A (His6-cynoTL1A) and a cynomolgus monkey soluble FasL (His6-cynoFasL) (amino acid sequence is SEQ ID NO: 122 and 124, respectively), the same sequences as in Example 7 were used. For LIGHT and TL1A, transient expression by Expi293 was performed, and for FasL, transient expression by CHO—S was performed.

[0505] FLAG-cynoLIGHT and His6-cynoTL1A were purified by the method mentioned in Example 13. Regarding His6-cynoFasL, the culture supernatant was passed through a column filled with Ni Sepharose Fast Flow resin (GE Healthcare), washed with a washing buffer (60 mM imidazole, 20 mM sodium phosphate, 0.5 M NaCl, pH 7.4) prepared using His Buffer Kit (GE Healthcare), and eluted with an elution buffer (250 mM imidazole, 20 mM sodium phosphate, 0.5 M NaCl, pH 7.4), and the buffer was substituted with PBS.

[0506] Purified FLAG-cynoLIGHT and His6-cynoTL1A were subjected to gel filtration chromatography (SEC) (Superdex 200 Increase 10/300 GL) (GE Healthcare) using AKTApurifier (GE Healthcare) to collect trimer fractions. Purified His6-cynoFasL was analyzed by SEC-UHPLC (apparatus: Nexera X2 (Shimadzu Corporation), column: ACQUITY UPLC Protein BEH SEC 200A, 1.7 μm, 4.6×150 mm (Waters K. K.)) to confirm that 85% or more of purified His6-cynoFasL was trimers.

### (2) Measurement of Binding Activity Using BIAcore

[0507] As chimera A-Fc variants and the variants with lowered FasL binding activities including various mutated Fc sequences, the variants mentioned in Example 12 were purified to 95% or more of monomers by SEC (Superdex 200 Increase 10/300 GL) (GE Healthcare) using AKTApurifier (GE Healthcare) or SEC (HiLoad 26/600 Superdex 200 μg) (GE Healthcare) using AKTA pure 25 (GE Healthcare) for use.

[0508] The binding activity to human and cynomolgus monkey DcR3 ligand trimers were analyzed by the SPR method. BIAcore T-100 (GE Healthcare) was used for measurement of the binding activities to human LIGHT, cynomolgus monkey LIGHT, human TL1A and cynomolgus monkey TL1A, and BIAcore T-200 (GE Healthcare) was used for measurement of the binding activities to human FasL and cynomolgus monkey FasL. As the buffer, HBS-EP+Buffer was used.

[0509] Various DcR3 variants were injected into Series S Sensor Chip Protein A (GE Healthcare) at 10 μL/min for 30 seconds and captured. Meanwhile, the buffer containing no protein was injected into a reference flow cell. Thereafter, as an analyte, each human DcR3 ligand trimer or each cynomolgus monkey DcR3 ligand trimer diluted to 0.08 to 20 nmol/L was injected. A human LIGHT trimer, a human TL1A trimer or each cynomolgus monkey DcR3 ligand trimer was injected at the flow rate of 30 μL/min for 2 minutes to monitor the binding, and subsequently the buffer was injected for 5 minutes to monitor dissociation. A human FasL trimer was injected at 30 μL/min for 1 minute to monitor the binding, and subsequently the buffer was injected for 3 minutes to monitor dissociation. Then, 3 mol/L magnesium chloride was injected at 30 μL/min for 1 minute to perform a regeneration reaction. For measurement of the binding activities to human LIGHT, cynomolgus monkey LIGHT, human TL1A and cynomolgus monkey TL1A, BIAcore T-100 evaluation software and 1:1 Binding model were used, and for measurement of the binding activities to human FasL and cynomolgus monkey FasL, BIAcore T-200 evaluation software and 1:1 Binding model were used, and by regarding each DcR3 ligand as a trimer (human LIGHT trimer: 62.4 kDa, cynomolgus monkey LIGHT trimer: 57.9 kDa, human TL1A trimer: 66.2 kDa, cynomolgus monkey TL1A trimer: 66.1 kDa, human FasL trimer: 53.1 kDa, cynomolgus monkey FasL trimer: 53.1 kDa), each kinetic constant (kₐ, k_{d}, K_{D}) was calculated.

[0510] As a result, it was confirmed that each of chimera A-Fc variants including various mutated Fc sequences (Eg1S, Eg1S YTE, Eg1S N434A, Eg1S LALAGA, Eg1S LALAGANA) (each amino acid sequence: SEQ ID NO: 168, 170, 172, 176, 178) binds to each DcR3 trimer ligand of a human and a cynomolgus monkey (FIG. 30A, B).

[0511] Each of the variants with lowered FasL binding activities including various mutated Fc sequences, i.e., E57K-Fc, E57R-Fc, E57V-Fc, 45-10-Fc and 45-18-Fc (each including Eg1S YTE, Eg1S N434A or Eg1S LALAGANA as an Fc) showed no remarkable difference in the K_{D} values to a human LIGHT trimer and a human TL1A trimer compared to those of chimera A-Eg1S. However, in each of these variants with lowered FasL binding activities, it was confirmed that the K_{D} value to a human FasL trimer is greatly increased compared to that of chimera A-Eg1S, and that the binding activity to human FasL is selectively lowered (FIG. 30A).

[0512] In each of the variants with lowered FasL binding activities including various mutated Fc sequences, the K_{D} value to a cynomolgus monkey LIGHT trimer or a cynomolgus monkey TL1A trimer was similar to that of chimera A-Eg1S, but in E57R-Fc (Eg1S YTE, Eg1S N434A), the binding activity to a cynomolgus monkey TL1A trimer tended to be attenuated. Meanwhile, in each of the variants with lowered FasL binding activities, it was confirmed that the K_{D} value to a cynomolgus monkey FasL trimer is greatly increased compared to that of chimera A-Eg1S, and that the binding activity to FasL is selectively lowered (FIG. 30B).

### [Example 21] Evaluation of Neutralizing Activity to DcR3 Soluble Ligand

[0513] Regarding each of the variants with lowered FasL binding activities including various mutated Fc sequences, evaluation of the neutralizing activities to soluble human LIGHT, soluble human TL1A and soluble human FasL was performed by the same method as in Example 9 or 14. As various DcR3 variants, chimera A-Fc variants produced in Example 12 or the variants with lowered FasL binding activities produced by transient expression in CHO—S cells, i.e., E57K-Fc variants and 45-18-Fc variants (each including Eg1S YTE or Eg1S LALAGANA as an Fc) were purified to 95% or more of monomers by the method mentioned in Example 14(1) or SEC (HiLoad 16/600 Superdex 200 μg) (GE Healthcare) using AKTApurifier (GE Healthcare) for use

### (1) Neutralizing Activity to Soluble Human LIGHT

[0514] Regarding each of various DcR3 variants, the inhibitory activity to LIGHT-dependent CXCL10 production from an IFN-γ-stimulated intestinal myofibroblast was evaluated by the method mentioned in Example 14. As a result, it was confirmed that each of chimera A-Fc variants, i.e., E57K-Fc variants and 45-18-Fc variants (each including Eg1S YTE or Eg1S LALAGANA as an Fc) concentration-dependently inhibits the CXCL10 production and has neutralizing activity to soluble LIGHT. The results are shown in FIG. 31.

### (2) Neutralizing Activity to Soluble Human TL1A

[0515] Regarding each of various DcR3 variants, the inhibitory activity to TL1A-dependent IFN-γ production from IL-12- and IL-18-stimulated human T cells was evaluated by the method mentioned in Example 9. As a result, it was confirmed that each of chimera A-Fc variants, E57K-Fc variants and 45-18-Fc variants (each including Eg1S YTE or Eg1S LALAGANA as an Fc) concentration-dependently inhibits the IFN-γ production and has neutralizing activity to soluble TL1A. The results are shown in FIG. 32.

### (3) Neutralizing Activity to Soluble Human FasL

[0516] Regarding each of various DcR3 variants, the inhibitory activity to FasL-dependent cell death of Jurkat cells was evaluated by the method mentioned in Example 9. As a result, it was confirmed that each of chimera A-Fc variants (Eg1S YTE, Eg1S LALAGANA) concentration-dependently inhibits cell death of Jurkat cells and has neutralizing activity to soluble FasL. Meanwhile, regarding E57K-Fc variants and 45-18-Fc variants (each including Eg1S YTE or Eg1S LALAGANA as an Fc), it was confirmed that, in each of the variants, the inhibitory activity to Jurkat cell death is remarkably decreased and the neutralizing activity to soluble FasL is selectively lowered. The results are shown in FIG. 33.

[0517] In FIGS. 31 to 33, the solid line and X (—x—) represents an anti-DNP antibody as a negative control; the solid line and solid circle (—•—) represents chimera A-Fc (Eg1S YTE); the solid line and open triangle (—Δ—) represents E57K-Fc (Eg1S YTE): the solid line and open circle (—º—) represents 45-18-Fc (Eg1S YTE); the dotted line and solid circle (—•—) represents chimera A-Fc (Eg1S LALAGANA); the dotted line and open triangle (—Δ—) represents E57K-Fc (Eg1S LALAGANA); and the dotted line and open circle (—º—) represents 45-18-Fc (Eg1S LALAGANA).

### [Example 22] Evaluation of Binding Activity to Membrane-bound DcR3 Ligand

[0518] Regarding each of the chimera A variants and the variants with lowered FasL binding activities including various mutated Fc sequences, the binding activities to membrane-bound human LIGHT, membrane-bound human TL1A and membrane-bound human FasL were evaluated by the same method as in Example 15.

[0519] Chimera A-Fc (Eg1S) was produced by cells of a stable expression cell line from CHO cells, and purified to 95% or more of monomers by SEC for use. All of chimera A-Fc variants (Eg1S YTE, Eg1S N434A, Eg1S LALAGA, Eg1S LALAGANA) were produced by transient expression in CHO—S cells, and purified to 95% or more of monomers by SEC for use. All of the variants with lowered FasL binding activities, i.e., E57K-Fc, E57R-Fc, E57V-Fc, 45-10-Fc and 45-18-Fc (each including Eg1S YTE or Eg1S LALAGANA as an Fc) were produced by transient expression in Expi293F cells, and purified to 95% or more of monomers by SEC for use. In all cases, SEC was performed by the same method as in Example 21.

[0520] With the cell lines each forcedly expressing a membrane molecule of human LIGHT, human TL1A and human FasL (also referred to as LIGHT/HEK293, TL1A/CHO and FasL/CHO, respectively) mentioned in Example 15, and HEK293 and CHO-K1 cells, which were used host cells thereof, the abovementioned samples were reacted at a final concentration of 10 μg/mL, and a secondary antibody Goat F(ab′)2 Anti-Human IgG R-phycoerythrin Conjugate (Southern Biotechnology Associates, Inc.) was reacted at a final concentration of 100 ng/mL, and the fluorescence intensity of PE was analyzed with a flow cytometer. The results are shown in FIGS. 34A, 34B and 34C. In FIG. 34A, each of the solid bars represents reactivity to LIGHT/HEK293, and each of the open bars represents reactivity to an HEK293 cell. In FIG. 34B, each of the solid bars represents reactivity to TL1A/CHO, and each of the open bars represents reactivity to a CHO-K1 cell. In FIG. 34C, each of the solid bars represents reactivity to FasL/CHO, and each of the open bars represents reactivity to a CHO-K1 cell.

[0521] As a result, as shown in FIGS. 34A and 34B, it was confirmed that each of chimera A-Fc variants (Eg1S, Eg1S YTE, Eg1S N434A, Eg1S LALAGA, Eg1S LALAGANA), E57K-Fc, E57R-Fc, E57V-Fc, 45-10-Fc and 45-18-Fc (each including Eg1S YTE or Eg1S LALAGANA as an Fc) binds to membrane-bound human LIGHT and membrane-bound TL1A. Meanwhile, as shown in FIG. 34C, it was confirmed that each of the variants with lowered FasL binding activities shows remarkably decreased binding activity to membrane-bound FasL as compared to chimera A variants including various mutated Fc sequences.

### [Example 23] Evaluation of Neutralizing Activity to Membrane-bound DcR3 Ligand

[0522] Regarding each of chimera A variants and the variants with lowered FasL binding activities including various mutated Fc sequences, the neutralizing activities to membrane-bound human LIGHT, membrane-bound human TL1A and membrane-bound human FasL were evaluated by the method shown below. All of chimera A-Fc, E57K-Fc and 45-18-Fc (each including Eg1S YTE or Eg1S LALAGANA as an Fc) were produced by transient expression in CHO—S, and, similarly to Example 21, purified to 95% or more of monomers by SEC for use.

### (1) Neutralizing Activity to Membrane-bound Human LIGHT

[0523] Regarding each of chimera A-Fc, E57K-Fc and 45-18-Fc (each including Eg1S YTE or Eg1S LALAGANA as an Fc), the neutralizing activity to membrane-bound human LIGHT was evaluated using a human intestinal myofibroblast (Lonza K. K.) and using CXCL10 production by co-culture with the cells of the membrane-bound LIGHT forced expression HEK293 cell line (LIGHT/HEK293) used in Example 22 as an index.

[0524] Human intestinal myofibroblasts were seeded at 1×10⁴ cells/well in a Collagen I coat 96 well plate (Corning Incorporated), and cultured at 37° C. overnight. After fixation with Fixation Buffer (BD Biosciences), 1×10⁴ cells/well of LIGHT/HEK293s washed with PBS and a medium, recombinant human IFN-γ (FUJIFILM Wako Pure Chemical Corporation) at the final concentration of 10 ng/mL, chimera A-Fc, E57K-Fc and 45-18-Fc (in all of which Fc is Eg1S YTE or Eg1S LALAGANA) at the final concentration of 4.88, 19.5, 78.1, 313, 1,250 or 5,000 ng/mL were added so that the total amount of the culture solution was adjusted to 200 μL/well. The culture supernatants after culture for 4 days were collected, and the CXCL10 concentrations in the culture supernatants were measured using CXCL10/IP-10 (human) AlphaLISA Detection Kit (PerkinElmer, Inc.). The results are shown in FIG. 35. In FIG. 35, the solid line and X (—x—) represents an anti-DNP antibody as a negative control; the solid line and solid circle (—º—) represents chimera A-Fc (Eg1S YTE); the solid line and open triangle (—Δ—) represents E57K-Fc (Eg1S YTE); the solid line and open circle (—•—) represents 45-18-Fc (Eg1S YTE); the dotted line and solid circle (—º—) represents chimera A-Fc (Eg1S LALAGANA); the dotted line and open triangle (—Δ—) represents E57K-Fc (Eg1S LALAGANA); and the dotted line and open circle (—•—) represents 45-18-Fc (Eg1S LALAGANA).

[0525] As shown in FIG. 35, it was confirmed that each of chimera A-Fc, E57K-Fc and 45-18-Fc (each including Eg1S YTE or Eg1S LALAGANA as an Fc) concentration-dependently inhibits the CXCL10 production by membrane-bound LIGHT, and that each of chimera A and the variants with lowered FasL binding activities, i.e., E57K-Fc and 45-18-Fc, has neutralizing activity to membrane-bound LIGHT.

### (2) Neutralizing Activity to Membrane-bound Human TL1A

[0526] Regarding each of chimera A-Fc, E57K-Fc and 45-18-Fc (each including Eg1S YTE or Eg1S LALAGANA as an Fc), the neutralizing activity to membrane-bound human TL1A was evaluated using human CD4-positive T cells and using IFN-γ production by co-culture with the cells of the membrane-bound TL1A forced expression CHO-K1 cell line (TL1A/CHO) used in Example 22 as an index.

[0527] From frozen healthy individual PBMCs (AlICells, LLC), CD4-positive T cells were isolated using EasySep Human CD4+ T cell Isolation Kit (STEMCELL Technologies Inc.). The isolated CD4-positive T cells were seeded at 2×10⁵ cells/well in a 96-well suspension culture plate, and then Human IL-12 (Miltenyi Biotec K. K.) at the final concentration of 2 ng/mL, Recombinant Human IL-18 (MEDICAL & BIOLOGICAL LABORATORIES CO., LTD.) at the final concentration of 50 ng/mL, and Human IL-15 (Miltenyi Biotec K. K.) at the final concentration of 25 ng/mL were added, followed by fixation with Fixation Buffer (BD Biosciences). Thereafter, membrane-bound TL1A expression CHO-K1 cells washed with PBS and a medium at the concentration of 3×10⁴ cells/well, and chimera A-Fc, E57K-Fc and 45-18-Fc (each including Eg1S YTE or Eg1S LALAGANA as an Fc) at the final concentration of 20, 50, 100, 250, 500 or 1,000 ng/mL were added so that the total amounts of the culture solution were adjusted to 200 μL/well. The culture supernatants after culture for 2 days were collected, and the IFN-γ concentrations in the culture supernatants were measured using AlphaLISA IFN-γ Immunoassay Research Kit (PerkinElmer, Inc.). The results are shown in FIG. 36. In FIG. 36, the solid line and X (—x—) represents an anti-DNP antibody as a negative control; the solid line and solid circle (—º—) represents chimera A-Fc (Eg1S YTE); the solid line and open triangle (—Δ—) represents E57K-Fc (Eg1S YTE); the solid line and open circle (—•—) represents 45-18-Fc (Eg1S YTE); the dotted line and solid circle (—º—) represents chimera A-Fc (Eg1S LALAGANA); the dotted line and open triangle (—Δ—) represents E57K-Fc (Eg1S LALAGANA); and the dotted line and open circle (—•—) represents 45-18-Fc (Eg1S LALAGANA).

[0528] As shown in FIG. 36, it was confirmed that each of chimera A-Fc, E57K-Fc and 45-18-Fc (each including Eg1S YTE or Eg1S LALAGANA as an Fc) concentration-dependently inhibits the IFN-γ production by membrane-bound TL1A, and that each of the variants with lowered FasL binding activities, i.e., E57K-Fc and 45-18-Fc, maintains neutralizing activity to membrane-bound TL1A similar to that of chimera A-Fc.

### (3) Neutralizing Activity to Membrane-bound Human FasL

[0529] Regarding each of chimera A-Fc, E57K-Fc and 45-18-Fc (each including Eg1S YTE or Eg1S LALAGANA as an Fc), the neutralizing activity to membrane-bound human FasL was measured using as an index apoptosis of Jurkat cells caused by co-culture with a cell line forcedly expressing membrane-bound FasL modified so as not to be cleaved to a soluble form.

[0530] A plasmid expressing a membrane-bound human FasL variant sequence (nucleotide sequence: SEQ ID NO: 343, amino acid sequence: SEQ ID NO: 344) obtained by adding a FLAG tag (DYKDDDDK) to the N-terminus and removing a FasL cleavage site (Glu128-Ile131) (Nat. Med., 1998, 4(1), p.31-36) and a proline-rich region of an intracellular region (Pro8-Pro69) (Nat. Med., 1996, 2(3), p.317-322) was produced by the following method. Using the membrane-bound FasL expression plasmid mentioned in Example 15 as a template and a primer designed to delete a target sequence, each of three regions, i.e., a region extending from a PstI site to Tyr7, a region extending from Pro70 to Leu127 and a region extending from Glyl32 to a NotI site each was subjected to PCR amplification, and each of the resultant products was inserted under a CMV promoter of a pClpuro vector by the same method as in Example 1. The plasmid thus obtained was introduced into CHO-K1 cells by the same method as in Example 15, and a membrane-bound human FasL variant high expression CHO-K1 cell line (FasLdel/CHO) was obtained by cell sorting of PE-labeled anti-human FasL antibody (BioLegend, Inc.)-positive fractions.

[0531] The FasLdel/CHO was seeded at 5×10³ cells/well in a 96-well adherent culture plate (Sumitomo Bakelite Co., Ltd.), and cultured in a 5% CO₂ incubator at 37° C. overnight, followed by washing the cells once. Jurkat cells were seeded at 5×10⁴ cells/well therein, and chimera A-Fc, E57K-Fc and 45-18-Fc (in all of which Fc is Eg1S YTE or Eg1S LALAGANA) were added at the final concentration of 24.4, 97.7, 391, 1,563, 6,250 or 25,000 ng/mL so that the total amount of the culture solution was adjusted to 100 μL/well. After culture in a 5% CO₂ incubator at 37° C. for 4 hours, only Jurkat cells were collected. The collected Jurkat cells were seeded in a 96-well U-bottom plate (Falcon), and stained using PE annexin V apoptosis detection kit (BD Biosciences) at room temperature for 15 minutes. After the cells were washed with an FCM buffer, the fluorescence intensity was analyzed by flow cytometer FACS Fortessa (BD Biosciences), and Annexin V-positive cells were detected as a dead cell subset. The results are shown in FIG. 37. In FIG. 37, the solid line and X (—x—) represents an anti-DNP antibody as a negative control; the solid line and solid circle (—º—) represents chimera A-Fc (Eg1S YTE); the solid line and open triangle (—Δ—) represents E57K-Fc (Eg1S YTE); the solid line and open circle (—•—) represents 45-18-Fc (Eg1S YTE); the dotted line and solid circle (—º—) represents chimera A-Fc (Eg1S LALAGANA); the dotted line and open triangle (—Δ—) represents E57K-Fc (Eg1S LALAGANA); and the dotted line and open circle (—•—) represents 45-18-Fc (Eg1S LALAGANA).

[0532] As shown in FIG. 37, it was confirmed that chimera A-Fc (Eg1S YTE, Eg1S LALAGANA) concentration-dependently inhibits cell death of Jurkat cells and has neutralizing activity to membrane-bound FasL. Meanwhile, regarding each of E57K-Fc and 45-18-Fc (each including Eg1S YTE or Eg1S LALAGANA as an Fc), it was confirmed that, in each of the variants, the inhibitory activity to Jurkat cell death is hardly exhibited even in the 25,000 ng/mL high concentration group and the neutralizing activity to membrane-bound FasL is remarkably decreased.

### [Example 24] Evaluation of Binding Activity to Soluble DcR3 Ligand Derived from Human Primary Cell

[0533] Regarding each of chimera A-Fc, E57K-Fc and 45-18-Fc (each including Eg1S YTE or Eg1S LALAGANA as an Fc), the binding activities to various soluble DcR ligands were evaluated using soluble DcR3 ligands derived from human primary cells. All of the test substances were produced by transient expression in CHO—S, and, similarly to Example 21, purified to 95% or more of monomers by SEC for use.

[0534] (1) Binding Activity to Primary LIGHT Regarding each of chimera A-Fc, E57K-Fc and 45-18-Fc (each including Eg1S YTE or Eg1S LALAGANA as an Fc), the binding activity to primary soluble LIGHT produced from activated human T cells was evaluated by the following method. The primary soluble LIGHT was prepared by the following method. In a 6-well adherent culture plate (Sumitomo Bakelite Co., Ltd.) to which 10 μg/mL of anti-CD3 antibody OKT3 (BioLegend, Inc.) was immobilized, human T cells isolated from thawed frozen healthy individual PBMCs (AlICells, LLC) were seeded at 7×10⁶ cells/well, and anti-CD28 antibodies (BioLegend, Inc.) at a final concentration of 1 μg/mL were added. After culture in a 5% CO₂ incubator for 3 days, the culture supernatant was collected. The concentration of primary soluble LIGHT in the collected culture supernatant was measured using Human LIGHT/TNFSF14 Quantikine ELISA Kit (R&D Systems, Inc.), and it was confirmed that soluble LIGHT existed at 14 μg/mL in the culture supernatant of unstimulated human T cells and at 5.6 ng/mL in the culture supernatant of human T cells stimulated with an anti-CD3 antibody and an anti-CD28 antibody.

[0535] Then, 10 μg/mL of anti-human IgG antibodies (American Qualex International, Inc.) were immobilized to a 96-well immunoplate (Thermo Scientific), and blocking was performed with 2% Block Ace (DS Pharma Biomedical Co., Ltd.), and then 2 μg/mL of chimera A-Fc, E57K-Fc and 45-18-Fc (in all of which Fc is Eg1S YTE or Eg1S LALAGANA) were captured. The culture supernatant of human T cells stimulated for LIGHT production was concentrated 6-fold using Amicon Ultra-15 having a molecular weight cutoff of 3 kDa (Merck Millipore) prerinsed with sterile water. After the plate was washed, the 6-fold concentrated culture supernatant was reacted. As a standard of LIGHT, the soluble recombinant FLAG-LIGHT trimer produced in Example 13 was used. After the plate was washed, a biotinylated anti-LIGHT antibody (R&D Systems, Inc.) was reacted. After the plate was washed, streptavidin-HRP (PIERCE) was reacted. After washing again, a TMB solution (Dako) was added to develop a color. Then, a 2 N sulfuric acid solution was used to stop the chromogenic reaction, and the absorbance at 450 nm (reference wavelength of 570 nm) was measured.

[0536] The results for the soluble recombinant FLAG-LIGHT trimer are shown in FIG. 38A, and the results for the culture supernatant of the human T cells stimulated for LIGHT expression are shown in FIG. 38B. In FIG. 38A, the solid line with X (—x—) represents an anti-DNP antibody as a negative control; the solid line with solid circle (—º—) represents chimera A-Fc (Eg1S YTE); the solid line with open square (—□—) represents chimera A-Fc(Eg1S); the solid line with open triangle (—Δ—) represents E57K-Fc (Eg1S YTE); the solid line with open circle (—•—) represents 45-18-Fc (Eg1S YTE); the dotted line with solid circle (—º—) represents chimera A-Fc (Eg1S LALAGANA); the dotted line with open triangle (—Δ—) represents E57K-Fc (Eg1S LALAGANA); and the dotted line with open circle (—•—) represents 45-18-Fc (Eg1S LALAGANA). In FIG. 38B, “6xsup. CD3/28” represented by the solid bar represents use of the 6-fold concentrated culture supernatant of human T cells stimulated for LIGHT expression under anti-CD3 antibody OKT3 and anti-CD28 antibody stimulation conditions, and “6xsup. none” represented by the open bar represents use of the 6-fold concentrated culture supernatant of unstimulated human T cells.

[0537] As shown in FIG. 38B, in a well in which each of chimera A-Fc, E57K-Fc and 45-18-Fc (each including Eg1S, Eg1S YTE or Eg1S LALAGANA as an Fc) was captured, LIGHT was detected only in the culture supernatant of human T cells stimulated for LIGHT expression. The results confirmed that each of chimera A-Fc, E57K-Fc and 45-18-Fc (each including Eg1S, Eg1S YTE or Eg1S LALAGANA as an Fc) binds to soluble LIGHT produced from human T cells stimulated with an anti-CD3 antibody and an anti-CD28 antibody.

### (2) Binding Activity to Primary TL1A

[0538] Regarding each of chimera A-Fc, E57K-Fc and 45-18-Fc (each including Eg1S YTE or Eg1S LALAGANA as an Fc), the binding activity to primary soluble TL1A produced from an activated human PBMC was evaluated. The primary soluble TL1A was prepared by the following method. To a 6-well adherent culture plate (Sumitomo Bakelite Co., Ltd.), 250 μg/mL of human IgG antibodies (Jackson ImmunoResearch Laboratories, Inc.) were immobilized, and further anti-human K light chain antibodies (Bethyl Laboratories, Inc.) and anti-human A light chain antibodies (Bethyl Laboratories, Inc.) were added at each final concentration of 100 μg/mL to treat for 1 hour, thus producing the immune complex. In the plate, thawed frozen healthy individual PBMCs (AlICells, LLC) were seeded at 6×10⁶ cells/well, followed by culture in a 5% CO₂ incubator at 37° C. After 3 days, the culture supernatant was collected, and concentrated 4-fold using Amicon Ultra-15 having a molecular weight cutoff of 3 kDa (Merck Millipore) prerinsed with sterile water.

[0539] Sandwich ELISA was performed by the same method as in (1). On a 96-well immunoplate, chimera A-Fc, E57K-Fc and 45-18-Fc (in all of which Fc is Eg1S YTE or Eg1S LALAGANA) or the anti-human TL1A antibody produced in Example 16 was captured. Then, with the plate, a 4-fold concentrated culture supernatant of PBMCs stimulated for TL1A production or as a standard, the soluble recombinant His6-TL1A trimer produced in Example 13 was reacted, followed by detection with a biotinylated anti-TL1A antibody (R&D Systems, Inc.).

[0540] The results for the soluble recombinant His6-TL1A trimer are shown in FIG. 38C, and the results for the culture supernatant of PBMCs stimulated for TL1A production are shown in FIG. 38D. In FIG. 38C, the solid line with X (—x—) represents an anti-DNP antibody as a negative control; the solid line with solid circle (—º—) represents chimera A-Fc (Eg1S YTE); the solid line with open square (—□—) represents chimera A-Fc (Eg1S); the solid line with open triangle (—Δ—) represents E57K-Fc (Eg1S YTE); the solid line with open circle (—•—) represents 45-18-Fc (Eg1S YTE); the dotted line with solid circle (—º—) represents chimera A-Fc (Eg1S LALAGANA); the dotted line with open triangle (—Δ—) represents E57K-Fc (Eg1S LALAGANA); the dotted line with open circle (—•—) represents 45-18-Fc (Eg1S LALAGANA); and the solid line with solid triangle (—▴—) represents an anti-TL1A antibody. In FIG. 38D, “4xsup. I.C.” represented by the solid bar represents use of the culture supernatant of PBMCs stimulated for TL1A expression under immune complex stimulation conditions, and “4xsup. none” represented by the open bar represents use of the culture supernatant of unstimulated PBMCs. As shown in FIG. 38D, in a well in which each of chimera A-Fc, E57K-Fc and 45-18-Fc (each including Eg1S, Eg1S YTE or Eg1S LALAGANA as an Fc) was captured, TL1A was detected only in the culture supernatant of PBMCs stimulated for TL1A expression. The results confirmed that chimera A-Fc, E57K-Fc and 45-18-Fc (each including Eg1S, Eg1S YTE or Eg1S LALAGANA as an Fc) binds to soluble TL1A produced from PBMCs stimulated with the immune complex.

### (3) Binding Activity to Primary FasL

[0541] Regarding each of chimera A-Fc, E57K-Fc and 45-18-Fc (each including Eg1S YTE or Eg1S LALAGANA as an Fc), the binding activity to primary soluble human FasL was evaluated. As the primary soluble FasL, soluble FasL produced from human T cells stimulated for activation-induced cell death (AICD) was prepared by the same method as in Example 16 for use.

[0542] Sandwich ELISA was performed by the same method as in (1). On a 96-well immunoplate, chimera A-Fc, E57K-Fc and 45-18-Fc (each including Eg1S YTE or Eg1S LALAGANA as an Fc) or Fas-Fc (R&D Systems, Inc.) was captured, and then a 6-fold concentrated culture supernatant of human T cells stimulated for AICD or as a standard, Human His6 Fas Ligand/TNFSF6 (Cell Signaling Technology, Inc.) was reacted, followed by detection with a biotinylated anti-FasL antibody included with Human Fas Ligand ELISA Kit (Abcam plc).

[0543] The results for the soluble recombinant His6-FasL are shown in FIG. 38E, and the results for the culture supernatant of human T cells stimulated for AICD are shown in FIG. 38F. In FIG. 38E, the solid line with X (—x—) represents an anti-DNP antibody as a negative control; the solid line with solid circle (—º—) represents chimera A-Fc (Eg1S YTE); the solid line with open square (—□—) represents chimera A-Fc(Eg1S); the solid line with open triangle (—Δ—) represents E57K-Fc (Eg1S YTE); the solid line with open circle (—•—) represents 45-18-Fc (Eg1S YTE); the dotted line with solid circle (—º—) represents chimera A-Fc (Eg1S LALAGANA); the dotted line with open triangle (—Δ—) represents E57K-Fc (Eg1S LALAGANA); the dotted line with open circle (—•—) represents 45-18-Fc (Eg1S LALAGANA); and the solid line with solid triangle (—▴—) represents Fas-Fc. In FIG. 38F, “6xsup. CD3” represented by the solid bar represents use of the culture supernatant of human T cells stimulated for AICD under anti-CD3 antibody OKT3 stimulation conditions, and “6xsup. none” represented by the open bar represents use of the culture supernatant of human T cells not stimulated for AICD. As shown in FIG. 38F, in a well in which chimera A-Fc (Eg1S, Eg1S YTE, Eg1S LALAGANA) was captured, FasL was detected only in the culture supernatant of human T cells stimulated for AICD. Meanwhile, in a well in which E57K-Fc or 45-18-Fc (each including Eg1S YTE or Eg1S LALAGANA as an Fc) was captured, it was confirmed that FasL detected in the culture supernatant of human T cells stimulated for AICD is remarkably decreased, and that, in each of these variants, the binding activity to soluble FasL derived from human T cells is attenuated.

### [Example 25] Evaluation of Physical Property of DcR3 Variant

[0544] Regarding E57K-Fc and 45-18-Fc (each including Eg1S YTE or Eg1S LALAGANA as an Fc) that were produced by transient expression in CHO—S and purified to 95% or more of monomers by SEC similarly to Example 21, using the same method as in Example 4, the elution times (min) were calculated by hydrophobic interaction chromatography (HIC) and the Tm values (° C.) were calculated by the differential scanning fluorimetry (DSF) method.

[0545] As a result, since all values showed values equivalent to those in Example 17, it was confirmed that a combination of the abovementioned amino acid mutation introduction into an IgG1 Fc sequence and the abovementioned amino acid substitution into the chimera A sequence does not affect the hydrophobicity and the thermostability.

### [Example 26] Evaluation of Mouse In Vivo Kinetics of DcR3 Variant

[0546] Regarding chimera A-Fc, E57K-Fc and 45-18-Fc (each including Eg1S YTE or Eg1S LALAGANA as an Fc) that were produced by transient expression in CHO—S and purified to 95% or more of monomers by SEC similarly to Example 21, in vivo kinetics in mice were evaluated by the same method as the method mentioned in Example 6. The results are shown in FIG. 39.

[0547] As shown in FIG. 39, compared to the AUC value of 354 for 5195-Fc (IEGRMD g1S) corresponding to wild-type DcR3 mentioned in Example 6, each of the DcR3 variants showed greater improvement in AUC.

### [Example 27] Evaluation of Aggregability of DcR3 Variant without Fc Fusion

[0548] A protein obtained by adding a His6 tag to the C-terminus of human wild-type DcR3 (S195) lacking an HBD region (5195-His6) (nucleotide sequence: SEQ ID NO: 345, amino acid sequence: SEQ ID NO: 346), a protein obtained by adding a His6 tag to the C-terminus of chimera A (chimera A-His6) (nucleotide sequence: SEQ ID NO: 347, amino acid sequence: SEQ ID NO: 348), a protein obtained by adding a His6 tag to the C-terminus of chimera A-E57K (chimera A-E57K-His6) (nucleotide sequence: SEQ ID NO: 349, amino acid sequence: SEQ ID NO: 350), and a protein obtained by adding a His6 tag to the C-terminus of 45-18 (45-18-His6) (nucleotide sequence: SEQ ID NO: 351, amino acid sequence: SEQ ID NO: 352) were produced as follows.

[0549] Regarding 5195-His6, a sequence obtained by adding a signal peptide sequence to the N-terminus of human DcR3 lacking HBD (DNA fragment: SEQ ID NO: 107) and adding a His6 tag sequence to the C-terminus thereof was artificially synthesized (Fasmac Co., Ltd.). Regarding chimera A-His6, chimera A-E57K-His6 and 45-18-His6, sequences obtained by adding a signal peptide sequence to the N-terminus of chimera A (DNA fragment: SEQ ID NO: 353), chimera A-E57K (DNA fragment: SEQ ID NO: 354) or 45-18 (DNA fragment: SEQ ID NO: 355), and adding a His6 tag sequence to the C-terminus thereof were artificially synthesized. Each artificial synthesis fragment was introduced into a pClpuro vector by the method mentioned in Example 1, and transient expression by Expi293 cells was performed. Using Amicon Ultra-0.5 having a molecular weight cutoff of 3 kDa (Merck Millipore) prerinsed with sterile water, the culture supernatant of the cells expressing 5195-His6 was concentrated 30-fold. Each culture supernatant of the cells expressing chimera A-His6, chimera A-E57K-His6 or 45-18-His6 was diluted 6-fold.

[0550] Using these culture supernatants, SDS-PAGE was performed under non-reducing conditions or 100 mM DTT reducing conditions, and then immunoblotting was performed using a mouse anti-6-His tag monoclonal antibody (Thermo Scientific) as a primary antibody and a goat anti-mouse IgG antibody (Southern Biotechnology Associates, Inc.) as a secondary antibody.

[0551] The results are shown in FIG. 40. In the culture supernatant of the cells transiently expressing 5195-His6, under reducing conditions in lane 1, a band was detected at near 20.9 kDa corresponding to an expected molecular weight, while under non-reducing conditions in lane 5, no bands of monomers were detected, and the whole was smear. The results confirmed that all of 5195-His6 existed as aggregates in the culture supernatant. Meanwhile, in all of the culture supernatants of the cells transiently expressing chimera A-His6, chimera A-E57K-His6 and 45-18-His6, under non-reducing conditions in lanes 2 to 4, bands of monomers were detected at near 22.2 kDa corresponding to an expected molecular weight, like reducing conditions in lanes 6 to 8. The results showed that, in the DcR3 variant of the present invention, the aggregate content is greatly decreased compared to that of wild-type DcR3. In other words, it was shown that substitution of CRD1 and CRD4 of DcR3 with CRD1 and CRD4 derived from OPG, respectively, has an effect to decrease aggregation that is observed in wild-type DcR3, and that this effect is exerted regardless of whether the binding activity to FasL is lowered.

[0552] Sequence Listing Free Text

SEQ ID NO: 1: nucleotide sequence of human DcR3 cDNA (Accession Number: NM_003823.3)
SEQ ID NO: 2: amino acid sequence of human DcR3 (Accession Number: NP_003814.1)
SEQ ID NO: 3: nucleotide sequence of human DcR3 (without signal peptide)
SEQ ID NO: 4: amino acid sequence of human DcR3 (without signal peptide)
SEQ ID NO: 5: nucleotide sequence of CRD1 of human DcR3
SEQ ID NO: 6: amino acid sequence of CRD1 of human DcR3
SEQ ID NO: 7: nucleotide sequence of CRD2 of human DcR3
SEQ ID NO: 8: amino acid sequence of CRD2 of human DcR3
SEQ ID NO: 9: nucleotide sequence of CRD3 of human DcR3
SEQ ID NO: 10: amino acid sequence of CRD3 of human DcR3
SEQ ID NO: 11: nucleotide sequence of CRD4 of human DcR3
SEQ ID NO: 12: amino acid sequence of CRD4 of human DcR3
SEQ ID NO: 13: nucleotide sequence of human OPG cDNA (Accession Number: NM_002546.3)
SEQ ID NO: 14: amino acid sequence of human OPG (Accession Number: NP_002537.3)
SEQ ID NO: 15: nucleotide sequence of human OPG (without signal peptide)
SEQ ID NO: 16: amino acid sequence of human OPG (without signal peptide)
SEQ ID NO: 17: nucleotide sequence of CRD1 of human OPG
SEQ ID NO: 18: amino acid sequence of CRD1 of human OPG
SEQ ID NO: 19: nucleotide sequence of CRD2 of human OPG
SEQ ID NO: 20: amino acid sequence of CRD2 of human OPG
SEQ ID NO: 21: nucleotide sequence of CRD3 of human OPG
SEQ ID NO: 22: amino acid sequence of CRD3 of human OPG
SEQ ID NO: 23: nucleotide sequence of CRD4 of human OPG
SEQ ID NO: 24: amino acid sequence of CRD4 of human OPG
SEQ ID NO: 25: nucleotide sequence of chimera B-HBD
SEQ ID NO: 26: amino acid sequence of chimera B-HBD
SEQ ID NO: 27: nucleotide sequence of chimera C-HBD
SEQ ID NO: 28: amino acid sequence of chimera C-HBD
SEQ ID NO: 29: nucleotide sequence of chimera A-HBD
SEQ ID NO: 30: amino acid sequence of chimera A-HBD
SEQ ID NO: 31: nucleotide sequence of 103-1230PG-HBD
SEQ ID NO: 32: amino acid sequence of 103-123OPG-HBD
SEQ ID NO: 33: nucleotide sequence of N131S/N144S-HBD
SEQ ID NO: 34: amino acid sequence of N131S/N144S-HBD
SEQ ID NO: 35: nucleotide sequence of T133A/S146A-HBD
SEQ ID NO: 36: amino acid sequence of T133A/S146A-HBD
SEQ ID NO: 37: nucleotide sequence of N131S/N144S/N157S-HBD
SEQ ID NO: 38: amino acid sequence of N131S/N144S/N157S-HBD
SEQ ID NO: 39: nucleotide sequence of T133A/S146A/T159A-HBD
SEQ ID NO: 40: amino acid sequence of T133A/S146A/T159A-HBD
SEQ ID NO: 41: nucleotide sequence of chimera A-E57K-HBD
SEQ ID NO: 42: amino acid sequence of chimera A-E57K-HBD
SEQ ID NO: 43: nucleotide sequence of chimera A-E57L-HBD
SEQ ID NO: 44: amino acid sequence of chimera A-E57L-HBD
SEQ ID NO: 45: nucleotide sequence of chimera A-R60K-HBD
SEQ ID NO: 46: amino acid sequence of chimera A-R60K-HBD
SEQ ID NO: 47: nucleotide sequence of HBD of wild-type DcR3
SEQ ID NO: 48: amino acid sequence of HBD of wild-type DcR3
SEQ ID NO: 49: nucleotide sequence of chimera B
SEQ ID NO: 50: amino acid sequence of chimera B
SEQ ID NO: 51: nucleotide sequence of chimera C
SEQ ID NO: 52: amino acid sequence of chimera C
SEQ ID NO: 53: nucleotide sequence of chimera A
SEQ ID NO: 54: amino acid sequence of chimera A
SEQ ID NO: 55: nucleotide sequence of 103-1230PG
SEQ ID NO: 56: amino acid sequence of 103-1230PG
SEQ ID NO: 57: nucleotide sequence of N131S/N144S
SEQ ID NO: 58: amino acid sequence of N131S/N144S
SEQ ID NO: 59: nucleotide sequence of T133A/S146A
SEQ ID NO: 60: amino acid sequence of T133A/S146A
SEQ ID NO: 61: nucleotide sequence of N131S/N144S/N157S
SEQ ID NO: 62: amino acid sequence of N131S/N144S/N157S
SEQ ID NO: 63: nucleotide sequence of T133A/S146A/T159A
SEQ ID NO: 64: amino acid sequence of T133A/S146A/T159A
SEQ ID NO: 65: nucleotide sequence of chimera A-E57K
SEQ ID NO: 66: amino acid sequence of chimera A-E57K
SEQ ID NO: 67: nucleotide sequence of chimera A-E57L
SEQ ID NO: 68: amino acid sequence of chimera A-E57L
SEQ ID NO: 69: nucleotide sequence of chimera A-R6OK
SEQ ID NO: 70: amino acid sequence of chimera A-R6OK
SEQ ID NO: 71: nucleotide sequence of Fc (g1S)
SEQ ID NO: 72: amino acid sequence of Fc (g1S)
SEQ ID NO: 73: nucleotide sequence of Fc (g4PEK)
SEQ ID NO: 74: amino acid sequence of Fc (g4PEK)
SEQ ID NO: 75: nucleotide sequence of chimera B-Fc (IEGRMD g1S)
SEQ ID NO: 76: amino acid sequence of chimera B-Fc (IEGRMD g1S)
SEQ ID NO: 77: nucleotide sequence of chimera C-Fc (IEGRMD g1S)
SEQ ID NO: 78: amino acid sequence of chimera C-Fc (IEGRMD g1S)
SEQ ID NO: 79: nucleotide sequence of chimera A-Fc (IEGRMD g1S)
SEQ ID NO: 80: amino acid sequence of chimera A-Fc (IEGRMD g1S)
SEQ ID NO: 81: nucleotide sequence of chimera A-Fc (g4PEK)
SEQ ID NO: 82: amino acid sequence of chimera A-Fc (g4PEK)
SEQ ID NO: 83: nucleotide sequence of 103-123OPG-Fc (g4PEK)
SEQ ID NO: 84: amino acid sequence of 103-123OPG-Fc (g4PEK)
SEQ ID NO: 85: nucleotide sequence of N131S/N144S-Fc (g4PEK)
SEQ ID NO: 86: amino acid sequence of N131S/N144S-Fc (g4PEK)
SEQ ID NO: 87: nucleotide sequence of T133A/S146A-Fc (g4PEK)
SEQ ID NO: 88: amino acid sequence of T133A/S146A-Fc (g4PEK)
SEQ ID NO: 89: nucleotide sequence of N131S/N144S/N157S-Fc (g4PEK)
SEQ ID NO: 90: amino acid sequence of N131S/N144S/N157S-Fc (g4PEK)
SEQ ID NO: 91: nucleotide sequence of T133A/S146A/T159A-Fc (g4PEK)
SEQ ID NO: 92: amino acid sequence of T133A/S146A/T159A-Fc (g4PEK)
SEQ ID NO: 93: nucleotide sequence of chimera A-E57K-Fc (g4PEK)
SEQ ID NO: 94: amino acid sequence of chimera A-E57K-Fc (g4PEK)
SEQ ID NO: 95: nucleotide sequence of chimera A-E57L-Fc (g4PEK)
SEQ ID NO: 96: amino acid sequence of chimera A-E57L-Fc (g4PEK)
SEQ ID NO: 97: nucleotide sequence of chimera A-R60K-Fc (g4PEK)
SEQ ID NO: 98: amino acid sequence of chimera A-R60K-Fc (g4PEK)
SEQ ID NO: 99: nucleotide sequence of DcR3 FL-Fc
SEQ ID NO: 100: amino acid sequence of DcR3 FL-Fc
SEQ ID NO: 101: nucleotide sequence of S195-Fc
SEQ ID NO: 102: amino acid sequence of 5195-Fc
SEQ ID NO: 103: nucleotide sequence of DcR3 FL-FLAG
SEQ ID NO: 104: amino acid sequence of DcR3 FL-FLAG
SEQ ID NO: 105: nucleotide sequence of linker IEGRMD
SEQ ID NO: 106: amino acid sequence of linker IEGRMD
SEQ ID NO: 107: nucleotide sequence of DcR3 (without signal peptide) with HBD deleted
SEQ ID NO: 108: amino acid sequence of DcR3 (without signal peptide) with HBD deleted
SEQ ID NO: 109: nucleotide sequence of FLAG tag
SEQ ID NO: 110: amino acid sequence of FLAG tag
SEQ ID NO: 111: nucleotide sequence of R218Q DcR3
SEQ ID NO: 112: amino acid sequence of R218Q DcR3
SEQ ID NO: 113: nucleotide sequence of soluble recombinant of human LIGHT
SEQ ID NO: 114: amino acid sequence of soluble recombinant of human LIGHT
SEQ ID NO: 115: nucleotide sequence of soluble recombinant of human TL1A
SEQ ID NO: 116: amino acid sequence of soluble recombinant of human TL1A
SEQ ID NO: 117: nucleotide sequence of soluble recombinant of human FasL
SEQ ID NO: 118: amino acid sequence of soluble recombinant of human FasL
SEQ ID NO: 119: nucleotide sequence of soluble recombinant of cynomolgus monkey LIGHT
SEQ ID NO: 120: amino acid sequence of soluble recombinant of cynomolgus monkey LIGHT
SEQ ID NO: 121: nucleotide sequence of soluble recombinant of cynomolgus monkey TL1A
SEQ ID NO: 122: amino acid sequence of soluble recombinant of cynomolgus monkey TL1A
SEQ ID NO: 123: nucleotide sequence of soluble recombinant of cynomolgus monkey FasL
SEQ ID NO: 124: amino acid sequence of soluble recombinant of cynomolgus monkey FasL
SEQ ID NO: 125: nucleotide sequence of soluble recombinant of mouse LIGHT
SEQ ID NO: 126: amino acid sequence of soluble recombinant of mouse LIGHT
SEQ ID NO: 127: nucleotide sequence of soluble recombinant of mouse TL1A
SEQ ID NO: 128: amino acid sequence of soluble recombinant of mouse TL1A
SEQ ID NO: 129: nucleotide sequence of soluble recombinant of mouse FasL
SEQ ID NO: 130: amino acid sequence of soluble recombinant of mouse FasL
SEQ ID NO: 131: nucleotide sequence of extracellular region (Asp74-Va1240) of human LIGHT
SEQ ID NO: 132: amino acid sequence of extracellular region (Asp74-Va1240) of human LIGHT
SEQ ID NO: 133: nucleotide sequence of extracellular region (Asp74-Va1240) of cynomolgus monkey LIGHT
SEQ ID NO: 134: amino acid sequence of extracellular region (Asp74-Va1240) of cynomolgus monkey LIGHT
SEQ ID NO: 135: nucleotide sequence of extracellular region (Asp72-Va1239) of mouse LIGHT
SEQ ID NO: 136: amino acid sequence of extracellular region (Asp72-Va1239) of mouse LIGHT
SEQ ID NO: 137: nucleotide sequence of extracellular region (Leu72-Leu251) of human TL1A
SEQ ID NO: 138: amino acid sequence of extracellular region (Leu72-Leu251) of human TL1A
SEQ ID NO: 139: nucleotide sequence of extracellular region (Leu72-Leu251) of cynomolgus monkey TL1A
SEQ ID NO: 140: amino acid sequence of extracellular region (Leu72-Leu251) of cynomolgus monkey TL1A
SEQ ID NO: 141: nucleotide sequence of extracellular region (Ile94-Leu270) of mouse TL1A
SEQ ID NO: 142: amino acid sequence of extracellular region (Ile94-Leu270) of mouse TL1A
SEQ ID NO: 143: nucleotide sequence of extracellular region (Pro134-Leu281) of human FasL
SEQ ID NO: 144: amino acid sequence of extracellular region (Pro134-Leu281) of human FasL
SEQ ID NO: 145: nucleotide sequence of extracellular region (Pro133-Leu280) of cynomolgus monkey FasL
SEQ ID NO: 146: amino acid sequence of extracellular region (Pro133-Leu280) of cynomolgus monkey FasL
SEQ ID NO: 147: nucleotide sequence of extracellular region (Pro132-Leu279) of mouse FasL
SEQ ID NO: 148: amino acid sequence of extracellular region (Pro132-Leu279) of mouse FasL
SEQ ID NO: 149: nucleotide sequence of chimera A-Fc (g1S)
SEQ ID NO: 150: amino acid sequence of chimera A-Fc (g1S)
SEQ ID NO: 151: nucleotide sequence of OPG K194-Fc
SEQ ID NO: 152: amino acid sequence of OPG K194-Fc
SEQ ID NO: 153: amino acid sequence of constant region of human IgG1 heavy chain
SEQ ID NO: 154: amino acid sequence of constant region of human IgG4 heavy chain
SEQ ID NO: 155: nucleotide sequence of Fc (Eg1S)
SEQ ID NO: 156: amino acid sequence of Fc (Eg1S)
SEQ ID NO: 157: nucleotide sequence of Fc (Eg1S-YTE)
SEQ ID NO: 158: amino acid sequence of Fc (Eg1S-YTE)
SEQ ID NO: 159: nucleotide sequence of Fc (Eg1S-N434A)
SEQ ID NO: 160: amino acid sequence of Fc (Eg1S-N434A)
SEQ ID NO: 161: nucleotide sequence of Fc (g1S-LALAGA)
SEQ ID NO: 162: amino acid sequence of Fc (g1S-LALAGA)
SEQ ID NO: 163: nucleotide sequence of Fc (Eg1S-LALAGA)
SEQ ID NO: 164: amino acid sequence of Fc (Eg1S-LALAGA)
SEQ ID NO: 165: nucleotide sequence of Fc (Eg1S-LALAGANA)
SEQ ID NO: 166: amino acid sequence of Fc (Eg1S-LALAGANA)
SEQ ID NO: 167: nucleotide sequence of chimera A-Fc (Eg1S)
SEQ ID NO: 168: amino acid sequence of chimera A-Fc (Eg1S)
SEQ ID NO: 169: nucleotide sequence of chimera A-Fc (Eg1S-YTE)
SEQ ID NO: 170: amino acid sequence of chimera A-Fc (Eg1S-YTE)
SEQ ID NO: 171: nucleotide sequence of chimera A-Fc (Eg1S-N434A)
SEQ ID NO: 172: amino acid sequence of chimera A-Fc (Eg1S-N434A)
SEQ ID NO: 173: nucleotide sequence of chimera A-Fc (g1S-LALAGA)
SEQ ID NO: 174: amino acid sequence of chimera A-Fc (g1S-LALAGA)
SEQ ID NO: 175: nucleotide sequence of chimera A-Fc (Eg1S-LALAGA)
SEQ ID NO: 176: amino acid sequence of chimera A-Fc (Eg1S-LALAGA)
SEQ ID NO: 177: nucleotide sequence of chimera A-Fc (Eg1S-LALAGANA)
SEQ ID NO: 178: amino acid sequence of chimera A-Fc (Eg1S-LALAGANA)
SEQ ID NO: 179: nucleotide sequence of chimera A-E57R
SEQ ID NO: 180: amino acid sequence of chimera A-E57R
SEQ ID NO: 181: nucleotide sequence of chimera A-E57V
SEQ ID NO: 182: amino acid sequence of chimera A-E57V
SEQ ID NO: 183: nucleotide sequence of chimera A-E57K_R58D
SEQ ID NO: 184: amino acid sequence of chimera A-E57K R58D
SEQ ID NO: 185: nucleotide sequence of chimera A-E57K_R58E
SEQ ID NO: 186: amino acid sequence of chimera A-E57K_R58E
SEQ ID NO: 187: nucleotide sequence of chimera A-E57R_R58D
SEQ ID NO: 188: amino acid sequence of chimera A-E57R_R58D
SEQ ID NO: 189: nucleotide sequence of chimera A-E57R-Fc (g4PEK)
SEQ ID NO: 190: amino acid sequence of chimera A-E57R-Fc (g4PEK)
SEQ ID NO: 191: nucleotide sequence of chimera A-E57V-Fc (g4PEK)
SEQ ID NO: 192: amino acid sequence of chimera A-E57V-Fc (g4PEK)
SEQ ID NO: 193: nucleotide sequence of chimera A-E57K_R58D-Fc (g4PEK)
SEQ ID NO: 194: amino acid sequence of chimera A-E57K_R58D-Fc (g4PEK)
SEQ ID NO: 195: nucleotide sequence of chimera A-E57K_R58E-Fc (g4PEK)
SEQ ID NO: 196: amino acid sequence of chimera A-E57K_R58E-Fc (g4PEK)
SEQ ID NO: 197: nucleotide sequence of chimera A-E57R_R58D-Fc (g4PEK)
SEQ ID NO: 198: amino acid sequence of chimera A-E57R_R58D-Fc (g4PEK)
SEQ ID NO: 199: nucleotide sequence of chimera A-E57K-Fc (Eg1S)
SEQ ID NO: 200: amino acid sequence of chimera A-E57K-Fc (Eg1S)
SEQ ID NO: 201: nucleotide sequence of chimera A-E57L-Fc (Eg1S)
SEQ ID NO: 202: amino acid sequence of chimera A-E57L-Fc (Eg1S)
SEQ ID NO: 203: nucleotide sequence of chimera A-E57R-Fc (Eg1S)
SEQ ID NO: 204: amino acid sequence of chimera A-E57R-Fc (Eg1S)
SEQ ID NO: 205: nucleotide sequence of chimera A-E57V-Fc (Eg1S)
SEQ ID NO: 206: amino acid sequence of chimera A-E57V-Fc (Eg1S)
SEQ ID NO: 207: nucleotide sequence of chimera A-E57K_R58D-Fc (Eg1S)
SEQ ID NO: 208: amino acid sequence of chimera A-E57K_R58D-Fc (Eg1S)
SEQ ID NO: 209: nucleotide sequence of chimera A-E57K_R58E-Fc (Eg1S)
SEQ ID NO: 210: amino acid sequence of chimera A-E57K_R58E-Fc (Eg1S)
SEQ ID NO: 211: nucleotide sequence of chimera A-E57R_R58D-Fc (Eg1S)
SEQ ID NO: 212: amino acid sequence of chimera A-E57R_R58D-Fc (Eg1S)
SEQ ID NO: 213: nucleotide sequence of chimera A-E57K-Fc (Eg1S YTE)
SEQ ID NO: 214: amino acid sequence of chimera A-E57K-Fc (Eg1S YTE)
SEQ ID NO: 215: nucleotide sequence of chimera A-E57L-Fc (Eg1S YTE)
SEQ ID NO: 216: amino acid sequence of chimera A-E57L-Fc (Eg1S YTE)
SEQ ID NO: 217: nucleotide sequence of chimera A-E57R-Fc (Eg1S YTE)
SEQ ID NO: 218: amino acid sequence of chimera A-E57R-Fc (Eg1S YTE)
SEQ ID NO: 219: nucleotide sequence of chimera A-E57V-Fc (Eg1S YTE)
SEQ ID NO: 220: amino acid sequence of chimera A-E57V-Fc (Eg1S YTE)
SEQ ID NO: 221: nucleotide sequence of chimera A-E57K_R58D-Fc (Eg1S YTE)
SEQ ID NO: 222: amino acid sequence of chimera A-E57K_R58D-Fc (Eg1S YTE)
SEQ ID NO: 223: nucleotide sequence of chimera A-E57K_R58E-Fc (Eg1S YTE)
SEQ ID NO: 224: amino acid sequence of chimera A-E57K_R58E-Fc (Eg1S YTE)
SEQ ID NO: 225: nucleotide sequence of chimera A-E57R_R58D-Fc (Eg1S YTE)
SEQ ID NO: 226: amino acid sequence of chimera A-E57R_R58D-Fc (Eg1S YTE)
SEQ ID NO: 227: nucleotide sequence of chimera A-E57K-Fc (Eg1S N434A)
SEQ ID NO: 228: amino acid sequence of chimera A-E57K-Fc (Eg1S N434A)
SEQ ID NO: 229: nucleotide sequence of chimera A-E57L-Fc (Eg1S N434A)
SEQ ID NO: 230: amino acid sequence of chimera A-E57L-Fc (Eg1S N434A)
SEQ ID NO: 231: nucleotide sequence of chimera A-E57R-Fc (Eg1S N434A)
SEQ ID NO: 232: amino acid sequence of chimera A-E57R-Fc (Eg1S N434A)
SEQ ID NO: 233: nucleotide sequence of chimera A-E57V-Fc (Eg1S N434A)
SEQ ID NO: 234: amino acid sequence of chimera A-E57V-Fc (Eg1S N434A)
SEQ ID NO: 235: nucleotide sequence of chimera A-E57K_R58D-Fc (Eg1S N434A)
SEQ ID NO: 236: amino acid sequence of chimera A-E57K_R58D-Fc (Eg1S N434A)
SEQ ID NO: 237: nucleotide sequence of chimera A-E57K_R58E-Fc (Eg1S N434A)
SEQ ID NO: 238: amino acid sequence of chimera A-E57K_R58E-Fc (Eg1S N434A)
SEQ ID NO: 239: nucleotide sequence of chimera A-E57R_R58D-Fc (Eg1S N434A)
SEQ ID NO: 240: amino acid sequence of chimera A-E57R_R58D-Fc (Eg1S N434A)
SEQ ID NO: 241: nucleotide sequence of chimera A-E57K-Fc (Eg1S LALAGA)
SEQ ID NO: 242: amino acid sequence of chimera A-E57K-Fc (Eg1S LALAGA)
SEQ ID NO: 243: nucleotide sequence of chimera A-E57L-Fc (Eg1S LALAGA)
SEQ ID NO: 244: amino acid sequence of chimera A-E57L-Fc (Eg1S LALAGA)
SEQ ID NO: 245: nucleotide sequence of chimera A-E57R-Fc (Eg1S LALAGA)
SEQ ID NO: 246: amino acid sequence of chimera A-E57R-Fc (Eg1S LALAGA)
SEQ ID NO: 247: nucleotide sequence of chimera A-E57V-Fc (Eg1S LALAGA)
SEQ ID NO: 248: amino acid sequence of chimera A-E57V-Fc (Eg1S LALAGA)
SEQ ID NO: 249: nucleotide sequence of chimera A-E57K_R58D-Fc (Eg1S LALAGA)
SEQ ID NO: 250: amino acid sequence of chimera A-E57K_R58D-Fc (Eg1S LALAGA)
SEQ ID NO: 251: nucleotide sequence of chimera A-E57K_R58E-Fc (Eg1S LALAGA)
SEQ ID NO: 252: amino acid sequence of chimera A-E57K_R58E-Fc (Eg1S LALAGA)
SEQ ID NO: 253: nucleotide sequence of chimera A-E57R_R58D-Fc (Eg1S LALAGA)
SEQ ID NO: 254: amino acid sequence of chimera A-E57R_R58D-Fc (Eg1S LALAGA)
SEQ ID NO: 255: nucleotide sequence of chimera A-E57K-Fc (Eg1S LALAGANA)
SEQ ID NO: 256: amino acid sequence of chimera A-E57K-Fc (Eg1S LALAGANA)
SEQ ID NO: 257: nucleotide sequence of chimera A-E57L-Fc (Eg1S LALAGANA)
SEQ ID NO: 258: amino acid sequence of chimera A-E57L-Fc (Eg1S LALAGANA)
SEQ ID NO: 259: nucleotide sequence of chimera A-E57R-Fc (Eg1S LALAGANA)
SEQ ID NO: 260: amino acid sequence of chimera A-E57R-Fc (Eg1S LALAGANA)
SEQ ID NO: 261: nucleotide sequence of chimera A-E57V-Fc (Eg1S LALAGANA)
SEQ ID NO: 262: amino acid sequence of chimera A-E57V-Fc (Eg1S LALAGANA)
SEQ ID NO: 263: nucleotide sequence of chimera A-E57K_R58D-Fc (Eg1S LALAGANA)
SEQ ID NO: 264: amino acid sequence of chimera A-E57K_R58D-Fc (Eg1S LALAGANA)
SEQ ID NO: 265: nucleotide sequence of chimera A-E57K_R58E-Fc (Eg1S LALAGANA)
SEQ ID NO: 266: amino acid sequence of chimera A-E57K R58E-Fc (Eg1S LALAGANA)
SEQ ID NO: 267: nucleotide sequence of chimera A-E57R_R58D-Fc (Eg1S LALAGANA)
SEQ ID NO: 268: amino acid sequence of chimera A-E57R_R58D-Fc (Eg1S LALAGANA)
SEQ ID NO: 269: nucleotide sequence of chimera A-E57A
SEQ ID NO: 270: amino acid sequence of chimera A-E57A
SEQ ID NO: 271: nucleotide sequence of chimera A-E57F
SEQ ID NO: 272: amino acid sequence of chimera A-E57F
SEQ ID NO: 273: nucleotide sequence of chimera A-E57H
SEQ ID NO: 274: amino acid sequence of chimera A-E57H
SEQ ID NO: 275: nucleotide sequence of chimera A-E57I
SEQ ID NO: 276: amino acid sequence of chimera A-E57I
SEQ ID NO: 277: nucleotide sequence of chimera A-E57M
SEQ ID NO: 278: amino acid sequence of chimera A-E57M
SEQ ID NO: 279: nucleotide sequence of chimera A-E57K_R58T
SEQ ID NO: 280: amino acid sequence of chimera A-E57K_R58T
SEQ ID NO: 281: nucleotide sequence of chimera A-E57L R58E
SEQ ID NO: 282: amino acid sequence of chimera A-E57L_R58E
SEQ ID NO: 283: nucleotide sequence of chimera A-E57V_R58T
SEQ ID NO: 284: amino acid sequence of chimera A-E57V R58T
SEQ ID NO: 285: nucleotide sequence of chimera A-E57V_R58E
SEQ ID NO: 286: amino acid sequence of chimera A-E57V_R58E
SEQ ID NO: 287: nucleotide sequence of chimera A-E57A-Fc (g4PEK)
SEQ ID NO: 288: amino acid sequence of chimera A-E57A-Fc (g4PEK)
SEQ ID NO: 289: nucleotide sequence of chimera A-E57F-Fc (g4PEK)
SEQ ID NO: 290: amino acid sequence of chimera A-E57F-Fc (g4PEK)
SEQ ID NO: 291: nucleotide sequence of chimera A-E57H-Fc (g4PEK)
SEQ ID NO: 292: amino acid sequence of chimera A-E57H-Fc (g4PEK)
SEQ ID NO: 293: nucleotide sequence of chimera A-E57I-Fc (g4PEK)
SEQ ID NO: 294: amino acid sequence of chimera A-E57I-Fc (g4PEK)
SEQ ID NO: 295: nucleotide sequence of chimera A-E57M-Fc (g4PEK)
SEQ ID NO: 296: amino acid sequence of chimera A-E57M-Fc (g4PEK)
SEQ ID NO: 297: nucleotide sequence of chimera A-E57K_R58T-Fc (g4PEK)
SEQ ID NO: 298: amino acid sequence of chimera A-E57K R58T-Fc (g4PEK)
SEQ ID NO: 299: nucleotide sequence of chimera A-E57L_R58E-Fc (g4PEK)
SEQ ID NO: 300: amino acid sequence of chimera A-E57L_R58E-Fc (g4PEK)
SEQ ID NO: 301: nucleotide sequence of chimera A-E57V_R58T-Fc (g4PEK)
SEQ ID NO: 302: amino acid sequence of chimera A-E57V_R58T-Fc (g4PEK)
SEQ ID NO: 303: nucleotide sequence of chimera A-E57V_R58E-Fc (g4PEK)
SEQ ID NO: 304: amino acid sequence of chimera A-E57V_R58E-Fc (g4PEK)
SEQ ID NO: 305: nucleotide sequence of soluble recombinant FLAG tagged LIGHT

[0553] SEQ ID NO: 306: amino acid sequence of soluble recombinant FLAG tagged LIGHT

SEQ ID NO: 307: nucleotide sequence of TL1A variant in which FLAG tag has been inserted at N-terminus of TL1A
SEQ ID NO: 308: amino acid sequence of TL1A variant in which FLAG tag is inserted at N-terminus of TL1A
SEQ ID NO: 309: nucleotide sequence of FasL variant in which FLAG tag is inserted at N-terminus of FasL
SEQ ID NO: 310: amino acid sequence of FasL variant in which FLAG tag is inserted at N-terminus of FasL
SEQ ID NO: 311: amino acid sequence of Fc (g1S YTE)
SEQ ID NO: 312: amino acid sequence of Fc (g1S N434A)
SEQ ID NO: 313: amino acid sequence of Fc (g1S LALAGANA)
SEQ ID NO: 314: amino acid sequence of chimera A-Fc (g1S YTE)
SEQ ID NO: 315: amino acid sequence of chimera A-Fc (g1S N434A)
SEQ ID NO: 316: amino acid sequence of chimera A-Fc (g1S LALAGANA)
SEQ ID NO: 317: amino acid sequence of chimera A-E57K-Fc (g1S YTE)
SEQ ID NO: 318: amino acid sequence of chimera A-E57L-Fc (g1S YTE)
SEQ ID NO: 319: amino acid sequence of chimera A-E57R-Fc (g1S YTE)
SEQ ID NO: 320: amino acid sequence of chimera A-E57V-Fc (g1S YTE)
SEQ ID NO: 321: amino acid sequence of chimera A-E57K R58D-Fc (g1S YTE)
SEQ ID NO: 322: amino acid sequence of chimera A-E57K_R58E-Fc (g1S YTE)
SEQ ID NO: 323: amino acid sequence of chimera A-E57R_R58D-Fc (g1S YTE)
SEQ ID NO: 324: amino acid sequence of chimera A-E57K-Fc (g1S N434A)
SEQ ID NO: 325: amino acid sequence of chimera A-E57L-Fc (g1S N434A)
SEQ ID NO: 326: amino acid sequence of chimera A-E57R-Fc (g1S N434A)
SEQ ID NO: 327: amino acid sequence of chimera A-E57V-Fc (g1S N434A)
SEQ ID NO: 328: amino acid sequence of chimera A-E57K_R58D-Fc (g1S N434A)
SEQ ID NO: 329: amino acid sequence of chimera A-E57K_R58E-Fc (g1S N434A)
SEQ ID NO: 330: amino acid sequence of chimera A-E57R_R58D-Fc (g1S N434A)
SEQ ID NO: 331: amino acid sequence of chimera A-E57K-Fc (g1S LALAGANA)
SEQ ID NO: 332: amino acid sequence of chimera A-E57L-Fc (g1S LALAGANA)
SEQ ID NO: 333: amino acid sequence of chimera A-E57R-Fc (g1S LALAGANA)
SEQ ID NO: 334: amino acid sequence of chimera A-E57V-Fc (g1S LALAGANA)
SEQ ID NO: 335: amino acid sequence of chimera A-E57K_R58D-Fc (g1S LALAGANA)
SEQ ID NO: 336: amino acid sequence of chimera A-E57K_R58E-Fc (g1S LALAGANA)
SEQ ID NO: 337: amino acid sequence of chimera A-E57R_R58D-Fc (g1S LALAGANA)
SEQ ID NO: 338: nucleotide sequence of Fc (IEGRMD g1S)
SEQ ID NO: 339: amino acid sequence of Fc (IEGRMD g1S)
SEQ ID NO: 340: amino acid sequence of R218Q-Fc
SEQ ID NO: 341: nucleotide sequence of FLAG-cynoLIGHT
SEQ ID NO: 342: amino acid sequence of FLAG-cynoLIGHT
SEQ ID NO: 343: nucleotide sequence of FasL variant in which cleavage site and intracellular proline-rich region are deleted from FasL as human DcR3 ligand and a FLAG tag is inserted at N-terminus
SEQ ID NO: 344: amino acid sequence of FasL variant in which cleavage site and intracellular proline-rich region are deleted from FasL as human DcR3 ligand and a FLAG tag is inserted at N-terminus
SEQ ID NO: 345: nucleotide sequence of 5195-His6
SEQ ID NO: 346: amino acid sequence of S195-His6
SEQ ID NO: 347: nucleotide sequence of chimera A-His6
SEQ ID NO: 348: amino acid sequence of chimera A-His6
SEQ ID NO: 349: nucleotide sequence of chimera A-E57K-His6
SEQ ID NO: 350: amino acid sequence of chimera A-E57K-His6
SEQ ID NO: 351: nucleotide sequence of chimera A-E57K_R58E-His6
SEQ ID NO: 352: amino acid sequence of chimera A-E57K R58E-His6
SEQ ID NO: 353: optimized nucleotide sequence of chimera A
SEQ ID NO: 354: optimized nucleotide sequence of chimera A-E57K
SEQ ID NO: 355: optimized nucleotide sequence of chimera A-E57K_R58E

The application's sequence listing, which the Patent Office published only in electronic form, follows.

SEQUENCE LISTING (355 sequences)

SEQ ID NO: 1 - DNA, 900 bp, Homo sapiens
  CDS (1)..(900)
  Human DcR3 cDNA (Accession number: NM_003823.3)
atgagggcgctggaggggccaggcctgtcgctgctgtgcctggtgttggcgctgcctgccctgctgccggtgccggctgtacgcggagtggcagaaacacccacctacccctggcgggacgcagagacaggggagcggctggtgtgcgcccagtgccccccaggcacctttgtgcagcggccgtgccgccgagacagccccacgacgtgtggcccgtgtccaccgcgccactacacgcagttctggaactacctagagcgctgccgctactgcaacgtcctctgcggggagcgtgaggaggaggcacgggcttgccacgccacccacaaccgtgcctgccgctgccgcaccggcttcttcgcgcacgctggtttctgcttggagcacgcatcgtgtccacctggtgccggcgtgattgccccgggcacccccagccagaacacgcagtgccagccgtgccccccaggcaccttctcagccagcagctccagctcagagcagtgccagccccaccgcaactgcacggccctgggcctggccctcaatgtgccaggctcttcctcccatgacaccctgtgcaccagctgcactggcttccccctcagcaccagggtaccaggagctgaggagtgtgagcgtgccgtcatcgactttgtggctttccaggacatctccatcaagaggctgcagcggctgctgcaggccctcgaggccccggagggctggggtccgacaccaagggcgggccgcgcggccttgcagctgaagctgcgtcggcggctcacggagctcctgggggcgcaggacggggcgctgctggtgcggctgctgcaggcgctgcgcgtggccaggatgcccgggctggagcggagcgtccgtgagcgcttcctccctgtgcac

SEQ ID NO: 2 - protein, 300 aa, Homo sapiens
  Amino acid sequence of Human DcR3 (Accession number: NP_003814.1)
MRALEGPGLSLLCLVLALPALLPVPAVRGVAETPTYPWRDAETGERLVCAQCPPGTFVQRPCRRDSPTTCGPCPPRHYTQFWNYLERCRYCNVLCGEREEEARACHATHNRACRCRTGFFAHAGFCLEHASCPPGAGVIAPGTPSQNTQCQPCPPGTFSASSSSSEQCQPHRNCTALGLALNVPGSSSHDTLCTSCTGFPLSTRVPGAEECERAVIDFVAFQDISIKRLQRLLQALEAPEGWGPTPRAGRAALQLKLRRRLTELLGAQDGALLVRLLQALRVARMPGLERSVRERFLPVH

SEQ ID NO: 3 - DNA, 813 bp, Homo sapiens
  CDS (1)..(813)
  Nucleotide sequence of Human DcR3 (without a signal peptide)
gtggcagaaacacccacctacccctggcgggacgcagagacaggggagcggctggtgtgcgcccagtgccccccaggcacctttgtgcagcggccgtgccgccgagacagccccacgacgtgtggcccgtgtccaccgcgccactacacgcagttctggaactacctagagcgctgccgctactgcaacgtcctctgcggggagcgtgaggaggaggcacgggcttgccacgccacccacaaccgtgcctgccgctgccgcaccggcttcttcgcgcacgctggtttctgcttggagcacgcatcgtgtccacctggtgccggcgtgattgccccgggcacccccagccagaacacgcagtgccagccgtgccccccaggcaccttctcagccagcagctccagctcagagcagtgccagccccaccgcaactgcacggccctgggcctggccctcaatgtgccaggctcttcctcccatgacaccctgtgcaccagctgcactggcttccccctcagcaccagggtaccaggagctgaggagtgtgagcgtgccgtcatcgactttgtggctttccaggacatctccatcaagaggctgcagcggctgctgcaggccctcgaggccccggagggctggggtccgacaccaagggcgggccgcgcggccttgcagctgaagctgcgtcggcggctcacggagctcctgggggcgcaggacggggcgctgctggtgcggctgctgcaggcgctgcgcgtggccaggatgcccgggctggagcggagcgtccgtgagcgcttcctccctgtgcac

SEQ ID NO: 4 - protein, 271 aa, Homo sapiens
  Amino acid sequence of Human DcR3 (without a signal peptide)
VAETPTYPWRDAETGERLVCAQCPPGTFVQRPCRRDSPTTCGPCPPRHYTQFWNYLERCRYCNVLCGEREEEARACHATHNRACRCRTGFFAHAGFCLEHASCPPGAGVIAPGTPSQNTQCQPCPPGTFSASSSSSEQCQPHRNCTALGLALNVPGSSSHDTLCTSCTGFPLSTRVPGAEECERAVIDFVAFQDISIKRLQRLLQALEAPEGWGPTPRAGRAALQLKLRRRLTELLGAQDGALLVRLLQALRVARMPGLERSVRERFLPVH

SEQ ID NO: 5 - DNA, 123 bp, Homo sapiens
  CDS (1)..(123)
  Nucleotide sequence of CRD1 of Human DcR3
gtggcagaaacacccacctacccctggcgggacgcagagacaggggagcggctggtgtgcgcccagtgccccccaggcacctttgtgcagcggccgtgccgccgagacagccccacgacgtgt

SEQ ID NO: 6 - protein, 41 aa, Homo sapiens
  Amino acid sequence of CRD1 of Human DcR3
VAETPTYPWRDAETGERLVCAQCPPGTFVQRPCRRDSPTTC

SEQ ID NO: 7 - DNA, 123 bp, Homo sapiens
  CDS (1)..(123)
  Nucleotide sequence of CRD2 of Human DcR3
tgtccaccgcgccactacacgcagttctggaactacctagagcgctgccgctactgcaacgtcctctgcggggagcgtgaggaggaggcacgggcttgccacgccacccacaaccgtgcctgc

SEQ ID NO: 8 - protein, 41 aa, Homo sapiens
  Amino acid sequence of CRD2 of Human DcR3
CPPRHYTQFWNYLERCRYCNVLCGEREEEARACHATHNRAC

SEQ ID NO: 9 - DNA, 108 bp, Homo sapiens
  CDS (1)..(108)
  Nucleotide sequence of CRD3 of Human DcR3
tgccgcaccggcttcttcgcgcacgctggtttctgcttggagcacgcatcgtgtccacctggtgccggcgtgattgccccgggcacccccagccagaacacgcagtgc

SEQ ID NO: 10 - protein, 36 aa, Homo sapiens
  Amino acid sequence of CRD3 of Human DcR3
CRTGFFAHAGFCLEHASCPPGAGVIAPGTPSQNTQC

SEQ ID NO: 11 - DNA, 123 bp, Homo sapiens
  CDS (1)..(123)
  Nucleotide sequence of CRD4 of Human DcR3
tgccccccaggcaccttctcagccagcagctccagctcagagcagtgccagccccaccgcaactgcacggccctgggcctggccctcaatgtgccaggctcttcctcccatgacaccctgtgc

SEQ ID NO: 12 - protein, 41 aa, Homo sapiens
  Amino acid sequence of CRD4 of Human DcR3
CPPGTFSASSSSSEQCQPHRNCTALGLALNVPGSSSHDTLC

SEQ ID NO: 13 - DNA, 1203 bp, Homo sapiens
  CDS (1)..(1203)
  Nucleotide sequence of Human OPG (Accession number: NM_002546.3)
atgaacaacttgctgtgctgcgcgctcgtgtttctggacatctccattaagtggaccacccaggaaacgtttcctccaaagtaccttcattatgacgaagaaacctctcatcagctgttgtgtgacaaatgtcctcctggtacctacctaaaacaacactgtacagcaaagtggaagaccgtgtgcgccccttgccctgaccactactacacagacagctggcacaccagtgacgagtgtctatactgcagccccgtgtgcaaggagctgcagtacgtcaagcaggagtgcaatcgcacccacaaccgcgtgtgcgaatgcaaggaagggcgctaccttgagatagagttctgcttgaaacataggagctgccctcctggatttggagtggtgcaagctggaaccccagagcgaaatacagtttgcaaaagatgtccagatgggttcttctcaaatgagacgtcatctaaagcaccctgtagaaaacacacaaattgcagtgtctttggtctcctgctaactcagaaaggaaatgcaacacacgacaacatatgttccggaaacagtgaatcaactcaaaaatgtggaatagatgttaccctgtgtgaggaggcattcttcaggtttgctgttcctacaaagtttacgcctaactggcttagtgtcttggtagacaatttgcctggcaccaaagtaaacgcagagagtgtagagaggataaaacggcaacacagctcacaagaacagactttccagctgctgaagttatggaaacatcaaaacaaagaccaagatatagtcaagaagatcatccaagatattgacctctgtgaaaacagcgtgcagcggcacattggacatgctaacctcaccttcgagcagcttcgtagcttgatggaaagcttaccgggaaagaaagtgggagcagaagacattgaaaaaacaataaaggcatgcaaacccagtgaccagatcctgaagctgctcagtttgtggcgaataaaaaatggcgaccaagacaccttgaagggcctaatgcacgcactaaagcactcaaagacgtaccactttcccaaaactgtcactcagagtctaaagaagaccatcaggttccttcacagcttcacaatgtacaaattgtatcagaagttatttttagaaatgataggtaaccaggtccaatcagtaaaaataagctgctta

SEQ ID NO: 14 - protein, 401 aa, Homo sapiens
  Amino acid sequence of Human OPG (Accession number: NP_002537.3)
MNNLLCCALVFLDISIKWTTQETFPPKYLHYDEETSHQLLCDKCPPGTYLKQHCTAKWKTVCAPCPDHYYTDSWHTSDECLYCSPVCKELQYVKQECNRTHNRVCECKEGRYLEIEFCLKHRSCPPGFGVVQAGTPERNTVCKRCPDGFFSNETSSKAPCRKHTNCSVFGLLLTQKGNATHDNICSGNSESTQKCGIDVTLCEEAFFRFAVPTKFTPNWLSVLVDNLPGTKVNAESVERIKRQHSSQEQTFQLLKLWKHQNKDQDIVKKIIQDIDLCENSVQRHIGHANLTFEQLRSLMESLPGKKVGAEDIEKTIKACKPSDQILKLLSLWRIKNGDQDTLKGLMHALKHSKTYHFPKTVTQSLKKTIRFLHSFTMYKLYQKLFLEMIGNQVQSVKISCL

SEQ ID NO: 15 - DNA, 1140 bp, Homo sapiens
  CDS (1)..(1140)
  Nucleotide sequence of Human OPG (without a signal peptide)
gaaacgtttcctccaaagtaccttcattatgacgaagaaacctctcatcagctgttgtgtgacaaatgtcctcctggtacctacctaaaacaacactgtacagcaaagtggaagaccgtgtgcgccccttgccctgaccactactacacagacagctggcacaccagtgacgagtgtctatactgcagccccgtgtgcaaggagctgcagtacgtcaagcaggagtgcaatcgcacccacaaccgcgtgtgcgaatgcaaggaagggcgctaccttgagatagagttctgcttgaaacataggagctgccctcctggatttggagtggtgcaagctggaaccccagagcgaaatacagtttgcaaaagatgtccagatgggttcttctcaaatgagacgtcatctaaagcaccctgtagaaaacacacaaattgcagtgtctttggtctcctgctaactcagaaaggaaatgcaacacacgacaacatatgttccggaaacagtgaatcaactcaaaaatgtggaatagatgttaccctgtgtgaggaggcattcttcaggtttgctgttcctacaaagtttacgcctaactggcttagtgtcttggtagacaatttgcctggcaccaaagtaaacgcagagagtgtagagaggataaaacggcaacacagctcacaagaacagactttccagctgctgaagttatggaaacatcaaaacaaagaccaagatatagtcaagaagatcatccaagatattgacctctgtgaaaacagcgtgcagcggcacattggacatgctaacctcaccttcgagcagcttcgtagcttgatggaaagcttaccgggaaagaaagtgggagcagaagacattgaaaaaacaataaaggcatgcaaacccagtgaccagatcctgaagctgctcagtttgtggcgaataaaaaatggcgaccaagacaccttgaagggcctaatgcacgcactaaagcactcaaagacgtaccactttcccaaaactgtcactcagagtctaaagaagaccatcaggttccttcacagcttcacaatgtacaaattgtatcagaagttatttttagaaatgataggtaaccaggtccaatcagtaaaaataagctgctta

SEQ ID NO: 16 - protein, 380 aa, Homo sapiens
  Amino acid sequence of Human OPG (without a signal peptide)
ETFPPKYLHYDEETSHQLLCDKCPPGTYLKQHCTAKWKTVCAPCPDHYYTDSWHTSDECLYCSPVCKELQYVKQECNRTHNRVCECKEGRYLEIEFCLKHRSCPPGFGVVQAGTPERNTVCKRCPDGFFSNETSSKAPCRKHTNCSVFGLLLTQKGNATHDNICSGNSESTQKCGIDVTLCEEAFFRFAVPTKFTPNWLSVLVDNLPGTKVNAESVERIKRQHSSQEQTFQLLKLWKHQNKDQDIVKKIIQDIDLCENSVQRHIGHANLTFEQLRSLMESLPGKKVGAEDIEKTIKACKPSDQILKLLSLWRIKNGDQDTLKGLMHALKHSKTYHFPKTVTQSLKKTIRFLHSFTMYKLYQKLFLEMIGNQVQSVKISCL

SEQ ID NO: 17 - DNA, 123 bp, Homo sapiens
  CDS (1)..(123)
  Nucleotide sequence of CRD1 of Human OPG
gaaacgtttcctccaaagtaccttcattatgacgaagaaacctctcatcagctgttgtgtgacaaatgtcctcctggtacctacctaaaacaacactgtacagcaaagtggaagaccgtgtgc

SEQ ID NO: 18 - protein, 41 aa, Homo sapiens
  Amino acid sequence of CRD1 of Human OPG
ETFPPKYLHYDEETSHQLLCDKCPPGTYLKQHCTAKWKTVC

SEQ ID NO: 19 - DNA, 123 bp, Homo sapiens
  CDS (1)..(123)
  Nucleotide sequence of CRD2 of Human OPG
tgccctgaccactactacacagacagctggcacaccagtgacgagtgtctatactgcagccccgtgtgcaaggagctgcagtacgtcaagcaggagtgcaatcgcacccacaaccgcgtgtgc

SEQ ID NO: 20 - protein, 41 aa, Homo sapiens
  Amino acid sequence of CRD2 of Human OPG
CPDHYYTDSWHTSDECLYCSPVCKELQYVKQECNRTHNRVC

SEQ ID NO: 21 - DNA, 108 bp, Homo sapiens
  CDS (1)..(108)
  Nucleotide sequence of CRD3 of Human OPG
tgcaaggaagggcgctaccttgagatagagttctgcttgaaacataggagctgccctcctggatttggagtggtgcaagctggaaccccagagcgaaatacagtttgc

SEQ ID NO: 22 - protein, 36 aa, Homo sapiens
  Amino acid sequence of CRD3 of Human OPG
CKEGRYLEIEFCLKHRSCPPGFGVVQAGTPERNTVC

SEQ ID NO: 23 - DNA, 123 bp, Homo sapiens
  CDS (1)..(123)
  Nucleotide sequence of CRD4 of Human OPG
tgtccagatgggttcttctcaaatgagacgtcatctaaagcaccctgtagaaaacacacaaattgcagtgtctttggtctcctgctaactcagaaaggaaatgcaacacacgacaacatatgt

SEQ ID NO: 24 - protein, 41 aa, Homo sapiens
  Amino acid sequence of CRD4 of Human OPG
CPDGFFSNETSSKAPCRKHTNCSVFGLLLTQKGNATHDNIC

SEQ ID NO: 25 - DNA, 813 bp, Artificial Sequence
  CDS (1)..(813)
  Nucleotide sequence of Chimera B-HBD
gagacctttccccctaagtacctccattacgacgaagaaacaagccaccaactcctctgtgacaagtgccccccagggacatatttgaaacagcactgtaccgcaaagtggaaaacagtatgcgccccttgcccaccaagacactacactcagttttggaattacctggagagatgccgctattgtaacgttctgtgtggtgagcgtgaggaagaagctcgagcatgccatgctactcacaatcgtgcttgccggtgtagaaccggtttttttgcccatgcaggcttctgcctggaacatgcaagctgtccccctggcgctggcgttatcgcacccggaactcctagccagaatacacaatgtcagccttgccctcccggcactttttctgcctcttccagttcatcagagcaatgccagcctcacagaaactgtaccgctctggggctcgccctgaatgtccccggctcttcaagtcacgataccctgtgcaccagctgcactggcttccccctcagcaccagggtaccaggagctgaggagtgtgagcgtgccgtcatcgactttgtggctttccaggacatctccatcaagaggctgcagcggctgctgcaggccctcgaggccccggagggctggggtccgacaccaagggcgggccgcgcggccttgcagctgaagctgcgtcggcggctcacggagctcctgggggcgcaggacggggcgctgctggtgcggctgctgcaggcgctgcgcgtggccaggatgcccgggctggagcggagcgtccgtgagcgcttcctccctgtgcac

SEQ ID NO: 26 - protein, 271 aa, Artificial Sequence
  Amino acid sequence of Chimera B-HBD
ETFPPKYLHYDEETSHQLLCDKCPPGTYLKQHCTAKWKTVCAPCPPRHYTQFWNYLERCRYCNVLCGEREEEARACHATHNRACRCRTGFFAHAGFCLEHASCPPGAGVIAPGTPSQNTQCQPCPPGTFSASSSSSEQCQPHRNCTALGLALNVPGSSSHDTLCTSCTGFPLSTRVPGAEECERAVIDFVAFQDISIKRLQRLLQALEAPEGWGPTPRAGRAALQLKLRRRLTELLGAQDGALLVRLLQALRVARMPGLERSVRERFLPVH

SEQ ID NO: 27 - DNA, 834 bp, Artificial Sequence
  CDS (1)..(834)
  Nucleotide sequence of Chimera C-HBD
gtagcagagacacccacctatccatggagggacgctgagaccggtgagcggctcgtttgcgcccaatgtccaccagggaccttcgttcagcggccctgccgacgggacagtccaacaacatgtggcccatgcccaccaagacactacactcagttttggaattacctggagagatgccgctattgtaacgttctgtgtggtgagcgtgaggaagaagctcgagcatgccatgctactcacaatcgtgcttgccggtgtagaaccggtttttttgcccatgcaggcttctgcctggaacatgcaagctgtccccctggcgctggcgttatcgcacccggaactcctagccagaatacacaatgtcagccttgccctgacggctttttctctaatgagacttcaagtaaagctccctgccgcaagcacaccaactgtagtgtgtttgggttgttgctgacccagaaggggaacgcaactcacgacaacatttgtagcgggaattcagaaagcacccaaaagtgcactggcttccccctcagcaccagggtaccaggagctgaggagtgtgagcgtgccgtcatcgactttgtggctttccaggacatctccatcaagaggctgcagcggctgctgcaggccctcgaggccccggagggctggggtccgacaccaagggcgggccgcgcggccttgcagctgaagctgcgtcggcggctcacggagctcctgggggcgcaggacggggcgctgctggtgcggctgctgcaggcgctgcgcgtggccaggatgcccgggctggagcggagcgtccgtgagcgcttcctccctgtgcac

SEQ ID NO: 28 - protein, 278 aa, Artificial Sequence
  Amino acid sequence of Chimera C-HBD
VAETPTYPWRDAETGERLVCAQCPPGTFVQRPCRRDSPTTCGPCPPRHYTQFWNYLERCRYCNVLCGEREEEARACHATHNRACRCRTGFFAHAGFCLEHASCPPGAGVIAPGTPSQNTQCQPCPDGFFSNETSSKAPCRKHTNCSVFGLLLTQKGNATHDNICSGNSESTQKCTGFPLSTRVPGAEECERAVIDFVAFQDISIKRLQRLLQALEAPEGWGPTPRAGRAALQLKLRRRLTELLGAQDGALLVRLLQALRVARMPGLERSVRERFLPVH

SEQ ID NO: 29 - DNA, 834 bp, Artificial Sequence
  CDS (1)..(834)
  Nucleotide sequence of Chimera A-HBD
gagacctttccccctaagtacctccattacgacgaagaaacaagccaccaactcctctgtgacaagtgccccccagggacatatttgaaacagcactgtaccgcaaagtggaaaacagtatgcgccccttgcccaccaagacactacactcagttttggaattacctggagagatgccgctattgtaacgttctgtgtggtgagcgtgaggaagaagctcgagcatgccatgctactcacaatcgtgcttgccggtgtagaaccggtttttttgcccatgcaggcttctgcctggaacatgcaagctgtccccctggcgctggcgttatcgcacccggaactcctagccagaatacacaatgtcagccttgccctgacggctttttctctaatgagacttcaagtaaagctccctgccgcaagcacaccaactgtagtgtgtttgggttgttgctgacccagaaggggaacgcaactcacgacaacatttgtagcgggaattcagaaagcacccaaaagtgcactggcttccccctcagcaccagggtaccaggagctgaggagtgtgagcgtgccgtcatcgactttgtggctttccaggacatctccatcaagaggctgcagcggctgctgcaggccctcgaggccccggagggctggggtccgacaccaagggcgggccgcgcggccttgcagctgaagctgcgtcggcggctcacggagctcctgggggcgcaggacggggcgctgctggtgcggctgctgcaggcgctgcgcgtggccaggatgcccgggctggagcggagcgtccgtgagcgcttcctccctgtgcac

SEQ ID NO: 30 - protein, 278 aa, Artificial Sequence
  Amino acid sequence of Chimera A-HBD
ETFPPKYLHYDEETSHQLLCDKCPPGTYLKQHCTAKWKTVCAPCPPRHYTQFWNYLERCRYCNVLCGEREEEARACHATHNRACRCRTGFFAHAGFCLEHASCPPGAGVIAPGTPSQNTQCQPCPDGFFSNETSSKAPCRKHTNCSVFGLLLTQKGNATHDNICSGNSESTQKCTGFPLSTRVPGAEECERAVIDFVAFQDISIKRLQRLLQALEAPEGWGPTPRAGRAALQLKLRRRLTELLGAQDGALLVRLLQALRVARMPGLERSVRERFLPVH

SEQ ID NO: 31 - DNA, 834 bp, Artificial Sequence
  CDS (1)..(834)
  Nucleotide sequence of 103-123OPG-HBD
gagacctttccccctaagtacctccattacgacgaagaaacaagccaccaactcctctgtgacaagtgccccccagggacatatttgaaacagcactgtaccgcaaagtggaaaacagtatgcgccccttgcccaccaagacactacactcagttttggaattacctggagagatgccgctattgtaacgttctgtgtggtgagcgtgaggaagaagctcgagcatgccatgctactcacaatcgtgcttgccggtgtagaaccggtttttttgcccatgcaggcttctgcctggaacatgcaagctgtcctccaggatttggggtggtccaagcagggacacccgagcggaacaccgtatgcaaacgatgtcctgacggctttttctctaatgagacttcaagtaaagctccctgccgcaagcacaccaactgtagtgtgtttgggttgttgctgacccagaaggggaacgcaactcacgacaacatttgtagcgggaattcagaaagcacccaaaagtgcactggcttccccctcagcaccagggtaccaggagctgaggagtgtgagcgtgccgtcatcgactttgtggctttccaggacatctccatcaagaggctgcagcggctgctgcaggccctcgaggccccggagggctggggtccgacaccaagggcgggccgcgcggccttgcagctgaagctgcgtcggcggctcacggagctcctgggggcgcaggacggggcgctgctggtgcggctgctgcaggcgctgcgcgtggccaggatgcccgggctggagcggagcgtccgtgagcgcttcctccctgtgcac

SEQ ID NO: 32 - protein, 278 aa, Artificial Sequence
  Amino acid sequence of 103-123OPG-HBD
ETFPPKYLHYDEETSHQLLCDKCPPGTYLKQHCTAKWKTVCAPCPPRHYTQFWNYLERCRYCNVLCGEREEEARACHATHNRACRCRTGFFAHAGFCLEHASCPPGFGVVQAGTPERNTVCKRCPDGFFSNETSSKAPCRKHTNCSVFGLLLTQKGNATHDNICSGNSESTQKCTGFPLSTRVPGAEECERAVIDFVAFQDISIKRLQRLLQALEAPEGWGPTPRAGRAALQLKLRRRLTELLGAQDGALLVRLLQALRVARMPGLERSVRERFLPVH

SEQ ID NO: 33 - DNA, 834 bp, Artificial Sequence
  CDS (1)..(834)
  Nucleotide sequence of N131S/N144S-HBD
gagacctttccccctaagtacctccattacgacgaagaaacaagccaccaactcctctgtgacaagtgccccccagggacatatttgaaacagcactgtaccgcaaagtggaaaacagtatgcgccccttgcccaccaagacactacactcagttttggaattacctggagagatgccgctattgtaacgttctgtgtggtgagcgtgaggaagaagctcgagcatgccatgctactcacaatcgtgcttgccggtgtagaaccggtttttttgcccatgcaggcttctgcctggaacatgcaagctgtccccctggcgctggcgttatcgcacccggaactcctagccagaatacacaatgtcagccttgccctgacggctttttctctagtgagacttcaagtaaagctccctgccgcaagcacaccagctgtagtgtgtttgggttgttgctgacccagaaggggaacgcaactcacgacaacatttgtagcgggaattcagaaagcacccaaaagtgcactggcttccccctcagcaccagggtaccaggagctgaggagtgtgagcgtgccgtcatcgactttgtggctttccaggacatctccatcaagaggctgcagcggctgctgcaggccctcgaggccccggagggctggggtccgacaccaagggcgggccgcgcggccttgcagctgaagctgcgtcggcggctcacggagctcctgggggcgcaggacggggcgctgctggtgcggctgctgcaggcgctgcgcgtggccaggatgcccgggctggagcggagcgtccgtgagcgcttcctccctgtgcac

SEQ ID NO: 34 - protein, 278 aa, Artificial Sequence
  Amino acid sequence of N131S/N144S-HBD
ETFPPKYLHYDEETSHQLLCDKCPPGTYLKQHCTAKWKTVCAPCPPRHYTQFWNYLERCRYCNVLCGEREEEARACHATHNRACRCRTGFFAHAGFCLEHASCPPGAGVIAPGTPSQNTQCQPCPDGFFSSETSSKAPCRKHTSCSVFGLLLTQKGNATHDNICSGNSESTQKCTGFPLSTRVPGAEECERAVIDFVAFQDISIKRLQRLLQALEAPEGWGPTPRAGRAALQLKLRRRLTELLGAQDGALLVRLLQALRVARMPGLERSVRERFLPVH

SEQ ID NO: 35 - DNA, 834 bp, Artificial Sequence
  CDS (1)..(834)
  Nucleotide sequence of T133A/S146A-HBD
gagacctttccccctaagtacctccattacgacgaagaaacaagccaccaactcctctgtgacaagtgccccccagggacatatttgaaacagcactgtaccgcaaagtggaaaacagtatgcgccccttgcccaccaagacactacactcagttttggaattacctggagagatgccgctattgtaacgttctgtgtggtgagcgtgaggaagaagctcgagcatgccatgctactcacaatcgtgcttgccggtgtagaaccggtttttttgcccatgcaggcttctgcctggaacatgcaagctgtccccctggcgctggcgttatcgcacccggaactcctagccagaatacacaatgtcagccttgccctgacggctttttctctaatgaggcttcaagtaaagctccctgccgcaagcacaccaactgtgctgtgtttgggttgttgctgacccagaaggggaacgcaactcacgacaacatttgtagcgggaattcagaaagcacccaaaagtgcactggcttccccctcagcaccagggtaccaggagctgaggagtgtgagcgtgccgtcatcgactttgtggctttccaggacatctccatcaagaggctgcagcggctgctgcaggccctcgaggccccggagggctggggtccgacaccaagggcgggccgcgcggccttgcagctgaagctgcgtcggcggctcacggagctcctgggggcgcaggacggggcgctgctggtgcggctgctgcaggcgctgcgcgtggccaggatgcccgggctggagcggagcgtccgtgagcgcttcctccctgtgcac

SEQ ID NO: 36 - protein, 278 aa, Artificial Sequence
  Amino acid sequence of T133A/S146A-HBD
ETFPPKYLHYDEETSHQLLCDKCPPGTYLKQHCTAKWKTVCAPCPPRHYTQFWNYLERCRYCNVLCGEREEEARACHATHNRACRCRTGFFAHAGFCLEHASCPPGAGVIAPGTPSQNTQCQPCPDGFFSNEASSKAPCRKHTNCAVFGLLLTQKGNATHDNICSGNSESTQKCTGFPLSTRVPGAEECERAVIDFVAFQDISIKRLQRLLQALEAPEGWGPTPRAGRAALQLKLRRRLTELLGAQDGALLVRLLQALRVARMPGLERSVRERFLPVH

SEQ ID NO: 37 - DNA, 834 bp, Artificial Sequence
  CDS (1)..(834)
  Nucleotide sequence of N131S/N144S/N157S-HBD
gagacctttccccctaagtacctccattacgacgaagaaacaagccaccaactcctctgtgacaagtgccccccagggacatatttgaaacagcactgtaccgcaaagtggaaaacagtatgcgccccttgcccaccaagacactacactcagttttggaattacctggagagatgccgctattgtaacgttctgtgtggtgagcgtgaggaagaagctcgagcatgccatgctactcacaatcgtgcttgccggtgtagaaccggtttttttgcccatgcaggcttctgcctggaacatgcaagctgtccccctggcgctggcgttatcgcacccggaactcctagccagaatacacaatgtcagccttgccctgacggctttttctctagtgagacttcaagtaaagctccctgccgcaagcacaccagctgtagtgtgtttgggttgttgctgacccagaaggggagcgcaactcacgacaacatttgtagcgggaattcagaaagcacccaaaagtgcactggcttccccctcagcaccagggtaccaggagctgaggagtgtgagcgtgccgtcatcgactttgtggctttccaggacatctccatcaagaggctgcagcggctgctgcaggccctcgaggccccggagggctggggtccgacaccaagggcgggccgcgcggccttgcagctgaagctgcgtcggcggctcacggagctcctgggggcgcaggacggggcgctgctggtgcggctgctgcaggcgctgcgcgtggccaggatgcccgggctggagcggagcgtccgtgagcgcttcctccctgtgcac

SEQ ID NO: 38 - protein, 278 aa, Artificial Sequence
  Amino acid sequence of N131S/N144S/N157S-HBD
ETFPPKYLHYDEETSHQLLCDKCPPGTYLKQHCTAKWKTVCAPCPPRHYTQFWNYLERCRYCNVLCGEREEEARACHATHNRACRCRTGFFAHAGFCLEHASCPPGAGVIAPGTPSQNTQCQPCPDGFFSSETSSKAPCRKHTSCSVFGLLLTQKGSATHDNICSGNSESTQKCTGFPLSTRVPGAEECERAVIDFVAFQDISIKRLQRLLQALEAPEGWGPTPRAGRAALQLKLRRRLTELLGAQDGALLVRLLQALRVARMPGLERSVRERFLPVH

SEQ ID NO: 39 - DNA, 834 bp, Artificial Sequence
  CDS (1)..(834)
  Nucleotide sequence of T133A/S146A/T159A-HBD
gagacctttccccctaagtacctccattacgacgaagaaacaagccaccaactcctctgtgacaagtgccccccagggacatatttgaaacagcactgtaccgcaaagtggaaaacagtatgcgccccttgcccaccaagacactacactcagttttggaattacctggagagatgccgctattgtaacgttctgtgtggtgagcgtgaggaagaagctcgagcatgccatgctactcacaatcgtgcttgccggtgtagaaccggtttttttgcccatgcaggcttctgcctggaacatgcaagctgtccccctggcgctggcgttatcgcacccggaactcctagccagaatacacaatgtcagccttgccctgacggctttttctctaatgaggcttcaagtaaagctccctgccgcaagcacaccaactgtgctgtgtttgggttgttgctgacccagaaggggaacgcagctcacgacaacatttgtagcgggaattcagaaagcacccaaaagtgcactggcttccccctcagcaccagggtaccaggagctgaggagtgtgagcgtgccgtcatcgactttgtggctttccaggacatctccatcaagaggctgcagcggctgctgcaggccctcgaggccccggagggctggggtccgacaccaagggcgggccgcgcggccttgcagctgaagctgcgtcggcggctcacggagctcctgggggcgcaggacggggcgctgctggtgcggctgctgcaggcgctgcgcgtggccaggatgcccgggctggagcggagcgtccgtgagcgcttcctccctgtgcac

SEQ ID NO: 40 - protein, 278 aa, Artificial Sequence
  Amino acid sequence of T133A/S146A/T159A-HBD
ETFPPKYLHYDEETSHQLLCDKCPPGTYLKQHCTAKWKTVCAPCPPRHYTQFWNYLERCRYCNVLCGEREEEARACHATHNRACRCRTGFFAHAGFCLEHASCPPGAGVIAPGTPSQNTQCQPCPDGFFSNEASSKAPCRKHTNCAVFGLLLTQKGNAAHDNICSGNSESTQKCTGFPLSTRVPGAEECERAVIDFVAFQDISIKRLQRLLQALEAPEGWGPTPRAGRAALQLKLRRRLTELLGAQDGALLVRLLQALRVARMPGLERSVRERFLPVH

SEQ ID NO: 41 - DNA, 834 bp, Artificial Sequence
  CDS (1)..(834)
  Nucleotide sequence of Chimera A-E57K-HBD
gagacctttccccctaagtacctccattacgacgaagaaacaagccaccaactcctctgtgacaagtgccccccagggacatatttgaaacagcactgtaccgcaaagtggaaaacagtatgcgccccttgcccaccaagacactacactcagttttggaattacctgaagagatgccgctattgtaacgttctgtgtggtgagcgtgaggaagaagctcgagcatgccatgctactcacaatcgtgcttgccggtgtagaaccggtttttttgcccatgcaggcttctgcctggaacatgcaagctgtccccctggcgctggcgttatcgcacccggaactcctagccagaatacacaatgtcagccttgccctgacggctttttctctaatgagacttcaagtaaagctccctgccgcaagcacaccaactgtagtgtgtttgggttgttgctgacccagaaggggaacgcaactcacgacaacatttgtagcgggaattcagaaagcacccaaaagtgcactggcttccccctcagcaccagggtaccaggagctgaggagtgtgagcgtgccgtcatcgactttgtggctttccaggacatctccatcaagaggctgcagcggctgctgcaggccctcgaggccccggagggctggggtccgacaccaagggcgggccgcgcggccttgcagctgaagctgcgtcggcggctcacggagctcctgggggcgcaggacggggcgctgctggtgcggctgctgcaggcgctgcgcgtggccaggatgcccgggctggagcggagcgtccgtgagcgcttcctccctgtgcac

SEQ ID NO: 42 - protein, 278 aa, Artificial Sequence
  Amino acid sequence of Chimera A-E57K-HBD
ETFPPKYLHYDEETSHQLLCDKCPPGTYLKQHCTAKWKTVCAPCPPRHYTQFWNYLKRCRYCNVLCGEREEEARACHATHNRACRCRTGFFAHAGFCLEHASCPPGAGVIAPGTPSQNTQCQPCPDGFFSNETSSKAPCRKHTNCSVFGLLLTQKGNATHDNICSGNSESTQKCTGFPLSTRVPGAEECERAVIDFVAFQDISIKRLQRLLQALEAPEGWGPTPRAGRAALQLKLRRRLTELLGAQDGALLVRLLQALRVARMPGLERSVRERFLPVH

SEQ ID NO: 43 - DNA, 834 bp, Artificial Sequence
  CDS (1)..(834)
  Nucleotide sequence of Chimera A-E57L-HBD
gagacctttccccctaagtacctccattacgacgaagaaacaagccaccaactcctctgtgacaagtgccccccagggacatatttgaaacagcactgtaccgcaaagtggaaaacagtatgcgccccttgcccaccaagacactacactcagttttggaattacctgctgagatgccgctattgtaacgttctgtgtggtgagcgtgaggaagaagctcgagcatgccatgctactcacaatcgtgcttgccggtgtagaaccggtttttttgcccatgcaggcttctgcctggaacatgcaagctgtccccctggcgctggcgttatcgcacccggaactcctagccagaatacacaatgtcagccttgccctgacggctttttctctaatgagacttcaagtaaagctccctgccgcaagcacaccaactgtagtgtgtttgggttgttgctgacccagaaggggaacgcaactcacgacaacatttgtagcgggaattcagaaagcacccaaaagtgcactggcttccccctcagcaccagggtaccaggagctgaggagtgtgagcgtgccgtcatcgactttgtggctttccaggacatctccatcaagaggctgcagcggctgctgcaggccctcgaggccccggagggctggggtccgacaccaagggcgggccgcgcggccttgcagctgaagctgcgtcggcggctcacggagctcctgggggcgcaggacggggcgctgctggtgcggctgctgcaggcgctgcgcgtggccaggatgcccgggctggagcggagcgtccgtgagcgcttcctccctgtgcac

SEQ ID NO: 44 - protein, 278 aa, Artificial Sequence
  Amino acid sequence of Chimera A-E57L-HBD
ETFPPKYLHYDEETSHQLLCDKCPPGTYLKQHCTAKWKTVCAPCPPRHYTQFWNYLLRCRYCNVLCGEREEEARACHATHNRACRCRTGFFAHAGFCLEHASCPPGAGVIAPGTPSQNTQCQPCPDGFFSNETSSKAPCRKHTNCSVFGLLLTQKGNATHDNICSGNSESTQKCTGFPLSTRVPGAEECERAVIDFVAFQDISIKRLQRLLQALEAPEGWGPTPRAGRAALQLKLRRRLTELLGAQDGALLVRLLQALRVARMPGLERSVRERFLPVH

SEQ ID NO: 45 - DNA, 834 bp, Artificial Sequence
  CDS (1)..(834)
  Nucleotide sequence of Chimera A-R60K-HBD
gagacctttccccctaagtacctccattacgacgaagaaacaagccaccaactcctctgtgacaagtgccccccagggacatatttgaaacagcactgtaccgcaaagtggaaaacagtatgcgccccttgcccaccaagacactacactcagttttggaattacctggagagatgcaagtattgtaacgttctgtgtggtgagcgtgaggaagaagctcgagcatgccatgctactcacaatcgtgcttgccggtgtagaaccggtttttttgcccatgcaggcttctgcctggaacatgcaagctgtccccctggcgctggcgttatcgcacccggaactcctagccagaatacacaatgtcagccttgccctgacggctttttctctaatgagacttcaagtaaagctccctgccgcaagcacaccaactgtagtgtgtttgggttgttgctgacccagaaggggaacgcaactcacgacaacatttgtagcgggaattcagaaagcacccaaaagtgcactggcttccccctcagcaccagggtaccaggagctgaggagtgtgagcgtgccgtcatcgactttgtggctttccaggacatctccatcaagaggctgcagcggctgctgcaggccctcgaggccccggagggctggggtccgacaccaagggcgggccgcgcggccttgcagctgaagctgcgtcggcggctcacggagctcctgggggcgcaggacggggcgctgctggtgcggctgctgcaggcgctgcgcgtggccaggatgcccgggctggagcggagcgtccgtgagcgcttcctccctgtgcac

SEQ ID NO: 46 - protein, 278 aa, Artificial Sequence
  Amino acid sequence of Chimera A-R60K-HBD
ETFPPKYLHYDEETSHQLLCDKCPPGTYLKQHCTAKWKTVCAPCPPRHYTQFWNYLERCKYCNVLCGEREEEARACHATHNRACRCRTGFFAHAGFCLEHASCPPGAGVIAPGTPSQNTQCQPCPDGFFSNETSSKAPCRKHTNCSVFGLLLTQKGNATHDNICSGNSESTQKCTGFPLSTRVPGAEECERAVIDFVAFQDISIKRLQRLLQALEAPEGWGPTPRAGRAALQLKLRRRLTELLGAQDGALLVRLLQALRVARMPGLERSVRERFLPVH

SEQ ID NO: 47 - DNA, 315 bp, Homo sapiens
  CDS (1)..(315)
  Nucleotide sequence of HBD of Wild type DcR3
tgcactggcttccccctcagcaccagggtaccaggagctgaggagtgtgagcgtgccgtcatcgactttgtggctttccaggacatctccatcaagaggctgcagcggctgctgcaggccctcgaggccccggagggctggggtccgacaccaagggcgggccgcgcggccttgcagctgaagctgcgtcggcggctcacggagctcctgggggcgcaggacggggcgctgctggtgcggctgctgcaggcgctgcgcgtggccaggatgcccgggctggagcggagcgtccgtgagcgcttcctccctgtgcac

SEQ ID NO: 48 - protein, 105 aa, Homo sapiens
  Amino acid sequence of HBD of Wild type DcR3
CTGFPLSTRVPGAEECERAVIDFVAFQDISIKRLQRLLQALEAPEGWGPTPRAGRAALQLKLRRRLTELLGAQDGALLVRLLQALRVARMPGLERSVRERFLPVH

SEQ ID NO: 49 - DNA, 498 bp, Artificial Sequence
  CDS (1)..(498)
  Nucleotide sequence of Chimera B
gagacctttccccctaagtacctccattacgacgaagaaacaagccaccaactcctctgtgacaagtgccccccagggacatatttgaaacagcactgtaccgcaaagtggaaaacagtatgcgccccttgcccaccaagacactacactcagttttggaattacctggagagatgccgctattgtaacgttctgtgtggtgagcgtgaggaagaagctcgagcatgccatgctactcacaatcgtgcttgccggtgtagaaccggtttttttgcccatgcaggcttctgcctggaacatgcaagctgtccccctggcgctggcgttatcgcacccggaactcctagccagaatacacaatgtcagccttgccctcccggcactttttctgcctcttccagttcatcagagcaatgccagcctcacagaaactgtaccgctctggggctcgccctgaatgtccccggctcttcaagtcacgataccctgtgcaccagc

SEQ ID NO: 50 - protein, 166 aa, Artificial Sequence
  Amino acid sequence of Chimera B
ETFPPKYLHYDEETSHQLLCDKCPPGTYLKQHCTAKWKTVCAPCPPRHYTQFWNYLERCRYCNVLCGEREEEARACHATHNRACRCRTGFFAHAGFCLEHASCPPGAGVIAPGTPSQNTQCQPCPPGTFSASSSSSEQCQPHRNCTALGLALNVPGSSSHDTLCTS

SEQ ID NO: 51 - DNA, 519 bp, Artificial Sequence
  CDS (1)..(519)
  Nucleotide sequence of Chimera C
gtagcagagacacccacctatccatggagggacgctgagaccggtgagcggctcgtttgcgcccaatgtccaccagggaccttcgttcagcggccctgccgacgggacagtccaacaacatgtggcccatgcccaccaagacactacactcagttttggaattacctggagagatgccgctattgtaacgttctgtgtggtgagcgtgaggaagaagctcgagcatgccatgctactcacaatcgtgcttgccggtgtagaaccggtttttttgcccatgcaggcttctgcctggaacatgcaagctgtccccctggcgctggcgttatcgcacccggaactcctagccagaatacacaatgtcagccttgccctgacggctttttctctaatgagacttcaagtaaagctccctgccgcaagcacaccaactgtagtgtgtttgggttgttgctgacccagaaggggaacgcaactcacgacaacatttgtagcgggaattcagaaagcacccaaaag

SEQ ID NO: 52 - protein, 173 aa, Artificial Sequence
  Amino acid sequence of Chimera C
VAETPTYPWRDAETGERLVCAQCPPGTFVQRPCRRDSPTTCGPCPPRHYTQFWNYLERCRYCNVLCGEREEEARACHATHNRACRCRTGFFAHAGFCLEHASCPPGAGVIAPGTPSQNTQCQPCPDGFFSNETSSKAPCRKHTNCSVFGLLLTQKGNATHDNICSGNSESTQK

SEQ ID NO: 53 - DNA, 519 bp, Artificial Sequence
  CDS (1)..(519)
  Nucleotide sequence of Chimera A
gagacctttccccctaagtacctccattacgacgaagaaacaagccaccaactcctctgtgacaagtgccccccagggacatatttgaaacagcactgtaccgcaaagtggaaaacagtatgcgccccttgcccaccaagacactacactcagttttggaattacctggagagatgccgctattgtaacgttctgtgtggtgagcgtgaggaagaagctcgagcatgccatgctactcacaatcgtgcttgccggtgtagaaccggtttttttgcccatgcaggcttctgcctggaacatgcaagctgtccccctggcgctggcgttatcgcacccggaactcctagccagaatacacaatgtcagccttgccctgacggctttttctctaatgagacttcaagtaaagctccctgccgcaagcacaccaactgtagtgtgtttgggttgttgctgacccagaaggggaacgcaactcacgacaacatttgtagcgggaattcagaaagcacccaaaag

SEQ ID NO: 54 - protein, 173 aa, Artificial Sequence
  Amino acid sequence of Chimera A
ETFPPKYLHYDEETSHQLLCDKCPPGTYLKQHCTAKWKTVCAPCPPRHYTQFWNYLERCRYCNVLCGEREEEARACHATHNRACRCRTGFFAHAGFCLEHASCPPGAGVIAPGTPSQNTQCQPCPDGFFSNETSSKAPCRKHTNCSVFGLLLTQKGNATHDNICSGNSESTQK

SEQ ID NO: 55 - DNA, 519 bp, Artificial Sequence
  CDS (1)..(519)
  Nucleotide sequence of 103-123OPG
gagacctttccccctaagtacctccattacgacgaagaaacaagccaccaactcctctgtgacaagtgccccccagggacatatttgaaacagcactgtaccgcaaagtggaaaacagtatgcgccccttgcccaccaagacactacactcagttttggaattacctggagagatgccgctattgtaacgttctgtgtggtgagcgtgaggaagaagctcgagcatgccatgctactcacaatcgtgcttgccggtgtagaaccggtttttttgcccatgcaggcttctgcctggaacatgcaagctgtcctccaggatttggggtggtccaagcagggacacccgagcggaacaccgtatgcaaacgatgtcctgacggctttttctctaatgagacttcaagtaaagctccctgccgcaagcacaccaactgtagtgtgtttgggttgttgctgacccagaaggggaacgcaactcacgacaacatttgtagcgggaattcagaaagcacccaaaag

SEQ ID NO: 56 - protein, 173 aa, Artificial Sequence
  Amino acid sequence of 103-123OPG
ETFPPKYLHYDEETSHQLLCDKCPPGTYLKQHCTAKWKTVCAPCPPRHYTQFWNYLERCRYCNVLCGEREEEARACHATHNRACRCRTGFFAHAGFCLEHASCPPGFGVVQAGTPERNTVCKRCPDGFFSNETSSKAPCRKHTNCSVFGLLLTQKGNATHDNICSGNSESTQK

SEQ ID NO: 57 - DNA, 519 bp, Artificial Sequence
  CDS (1)..(519)
  Nucleotide sequence of N131S/N144S
gagacctttccccctaagtacctccattacgacgaagaaacaagccaccaactcctctgtgacaagtgccccccagggacatatttgaaacagcactgtaccgcaaagtggaaaacagtatgcgccccttgcccaccaagacactacactcagttttggaattacctggagagatgccgctattgtaacgttctgtgtggtgagcgtgaggaagaagctcgagcatgccatgctactcacaatcgtgcttgccggtgtagaaccggtttttttgcccatgcaggcttctgcctggaacatgcaagctgtccccctggcgctggcgttatcgcacccggaactcctagccagaatacacaatgtcagccttgccctgacggctttttctctagtgagacttcaagtaaagctccctgccgcaagcacaccagctgtagtgtgtttgggttgttgctgacccagaaggggaacgcaactcacgacaacatttgtagcgggaattcagaaagcacccaaaag

SEQ ID NO: 58 - protein, 173 aa, Artificial Sequence
  Amino acid sequence of N131S/N144S
ETFPPKYLHYDEETSHQLLCDKCPPGTYLKQHCTAKWKTVCAPCPPRHYTQFWNYLERCRYCNVLCGEREEEARACHATHNRACRCRTGFFAHAGFCLEHASCPPGAGVIAPGTPSQNTQCQPCPDGFFSSETSSKAPCRKHTSCSVFGLLLTQKGNATHDNICSGNSESTQK

SEQ ID NO: 59 - DNA, 519 bp, Artificial Sequence
  CDS (1)..(519)
  Nucleotide sequence of T133A/S146A
gagacctttccccctaagtacctccattacgacgaagaaacaagccaccaactcctctgtgacaagtgccccccagggacatatttgaaacagcactgtaccgcaaagtggaaaacagtatgcgccccttgcccaccaagacactacactcagttttggaattacctggagagatgccgctattgtaacgttctgtgtggtgagcgtgaggaagaagctcgagcatgccatgctactcacaatcgtgcttgccggtgtagaaccggtttttttgcccatgcaggcttctgcctggaacatgcaagctgtccccctggcgctggcgttatcgcacccggaactcctagccagaatacacaatgtcagccttgccctgacggctttttctctaatgaggcttcaagtaaagctccctgccgcaagcacaccaactgtgctgtgtttgggttgttgctgacccagaaggggaacgcaactcacgacaacatttgtagcgggaattcagaaagcacccaaaag

SEQ ID NO: 60 - protein, 173 aa, Artificial Sequence
  Amino acid sequence of T133A/S146A
ETFPPKYLHYDEETSHQLLCDKCPPGTYLKQHCTAKWKTVCAPCPPRHYTQFWNYLERCRYCNVLCGEREEEARACHATHNRACRCRTGFFAHAGFCLEHASCPPGAGVIAPGTPSQNTQCQPCPDGFFSNEASSKAPCRKHTNCAVFGLLLTQKGNATHDNICSGNSESTQK

SEQ ID NO: 61 - DNA, 519 bp, Artificial Sequence
  CDS (1)..(519)
  Nucleotide sequence of N131S/N144S/N157S
gagacctttccccctaagtacctccattacgacgaagaaacaagccaccaactcctctgtgacaagtgccccccagggacatatttgaaacagcactgtaccgcaaagtggaaaacagtatgcgccccttgcccaccaagacactacactcagttttggaattacctggagagatgccgctattgtaacgttctgtgtggtgagcgtgaggaagaagctcgagcatgccatgctactcacaatcgtgcttgccggtgtagaaccggtttttttgcccatgcaggcttctgcctggaacatgcaagctgtccccctggcgctggcgttatcgcacccggaactcctagccagaatacacaatgtcagccttgccctgacggctttttctctagtgagacttcaagtaaagctccctgccgcaagcacaccagctgtagtgtgtttgggttgttgctgacccagaaggggagcgcaactcacgacaacatttgtagcgggaattcagaaagcacccaaaag

SEQ ID NO: 62 - protein, 173 aa, Artificial Sequence
  Amino acid sequence of N131S/N144S/N157S
ETFPPKYLHYDEETSHQLLCDKCPPGTYLKQHCTAKWKTVCAPCPPRHYTQFWNYLERCRYCNVLCGEREEEARACHATHNRACRCRTGFFAHAGFCLEHASCPPGAGVIAPGTPSQNTQCQPCPDGFFSSETSSKAPCRKHTSCSVFGLLLTQKGSATHDNICSGNSESTQK

SEQ ID NO: 63 - DNA, 519 bp, Artificial Sequence
  CDS (1)..(519)
  Nucleotide sequence of T133A/S146A/T159A
gagacctttccccctaagtacctccattacgacgaagaaacaagccaccaactcctctgtgacaagtgccccccagggacatatttgaaacagcactgtaccgcaaagtggaaaacagtatgcgccccttgcccaccaagacactacactcagttttggaattacctggagagatgccgctattgtaacgttctgtgtggtgagcgtgaggaagaagctcgagcatgccatgctactcacaatcgtgcttgccggtgtagaaccggtttttttgcccatgcaggcttctgcctggaacatgcaagctgtccccctggcgctggcgttatcgcacccggaactcctagccagaatacacaatgtcagccttgccctgacggctttttctctaatgaggcttcaagtaaagctccctgccgcaagcacaccaactgtgctgtgtttgggttgttgctgacccagaaggggaacgcagctcacgacaacatttgtagcgggaattcagaaagcacccaaaag

SEQ ID NO: 64 - protein, 173 aa, Artificial Sequence
  Amino acid sequence of T133A/S146A/T159A
ETFPPKYLHYDEETSHQLLCDKCPPGTYLKQHCTAKWKTVCAPCPPRHYTQFWNYLERCRYCNVLCGEREEEARACHATHNRACRCRTGFFAHAGFCLEHASCPPGAGVIAPGTPSQNTQCQPCPDGFFSNEASSKAPCRKHTNCAVFGLLLTQKGNAAHDNICSGNSESTQK

SEQ ID NO: 65 - DNA, 519 bp, Artificial Sequence
  CDS (1)..(519)
  Nucleotide sequence of Chimera A-E57K
gagacctttccccctaagtacctccattacgacgaagaaacaagccaccaactcctctgtgacaagtgccccccagggacatatttgaaacagcactgtaccgcaaagtggaaaacagtatgcgccccttgcccaccaagacactacactcagttttggaattacctgaagagatgccgctattgtaacgttctgtgtggtgagcgtgaggaagaagctcgagcatgccatgctactcacaatcgtgcttgccggtgtagaaccggtttttttgcccatgcaggcttctgcctggaacatgcaagctgtccccctggcgctggcgttatcgcacccggaactcctagccagaatacacaatgtcagccttgccctgacggctttttctctaatgagacttcaagtaaagctccctgccgcaagcacaccaactgtagtgtgtttgggttgttgctgacccagaaggggaacgcaactcacgacaacatttgtagcgggaattcagaaagcacccaaaag

SEQ ID NO: 66 - protein, 173 aa, Artificial Sequence
  Amino acid sequence of Chimera A-E57K
ETFPPKYLHYDEETSHQLLCDKCPPGTYLKQHCTAKWKTVCAPCPPRHYTQFWNYLKRCRYCNVLCGEREEEARACHATHNRACRCRTGFFAHAGFCLEHASCPPGAGVIAPGTPSQNTQCQPCPDGFFSNETSSKAPCRKHTNCSVFGLLLTQKGNATHDNICSGNSESTQK

SEQ ID NO: 67 - DNA, 519 bp, Artificial Sequence
  CDS (1)..(519)
  Nucleotide sequence of Chimera A-E57L
gagacctttccccctaagtacctccattacgacgaagaaacaagccaccaactcctctgtgacaagtgccccccagggacatatttgaaacagcactgtaccgcaaagtggaaaacagtatgcgccccttgcccaccaagacactacactcagttttggaattacctgctgagatgccgctattgtaacgttctgtgtggtgagcgtgaggaagaagctcgagcatgccatgctactcacaatcgtgcttgccggtgtagaaccggtttttttgcccatgcaggcttctgcctggaacatgcaagctgtccccctggcgctggcgttatcgcacccggaactcctagccagaatacacaatgtcagccttgccctgacggctttttctctaatgagacttcaagtaaagctccctgccgcaagcacaccaactgtagtgtgtttgggttgttgctgacccagaaggggaacgcaactcacgacaacatttgtagcgggaattcagaaagcacccaaaag

SEQ ID NO: 68 - protein, 173 aa, Artificial Sequence
  Amino acid sequence of Chimera A-E57L
ETFPPKYLHYDEETSHQLLCDKCPPGTYLKQHCTAKWKTVCAPCPPRHYTQFWNYLLRCRYCNVLCGEREEEARACHATHNRACRCRTGFFAHAGFCLEHASCPPGAGVIAPGTPSQNTQCQPCPDGFFSNETSSKAPCRKHTNCSVFGLLLTQKGNATHDNICSGNSESTQK

SEQ ID NO: 69 - DNA, 519 bp, Artificial Sequence
  CDS (1)..(519)
  Nucleotide sequence of Chimera A-R60K
gagacctttccccctaagtacctccattacgacgaagaaacaagccaccaactcctctgtgacaagtgccccccagggacatatttgaaacagcactgtaccgcaaagtggaaaacagtatgcgccccttgcccaccaagacactacactcagttttggaattacctggagagatgcaagtattgtaacgttctgtgtggtgagcgtgaggaagaagctcgagcatgccatgctactcacaatcgtgcttgccggtgtagaaccggtttttttgcccatgcaggcttctgcctggaacatgcaagctgtccccctggcgctggcgttatcgcacccggaactcctagccagaatacacaatgtcagccttgccctgacggctttttctctaatgagacttcaagtaaagctccctgccgcaagcacaccaactgtagtgtgtttgggttgttgctgacccagaaggggaacgcaactcacgacaacatttgtagcgggaattcagaaagcacccaaaag

SEQ ID NO: 70 - protein, 173 aa, Artificial Sequence
  Amino acid sequence of Chimera A-R60K
ETFPPKYLHYDEETSHQLLCDKCPPGTYLKQHCTAKWKTVCAPCPPRHYTQFWNYLERCKYCNVLCGEREEEARACHATHNRACRCRTGFFAHAGFCLEHASCPPGAGVIAPGTPSQNTQCQPCPDGFFSNETSSKAPCRKHTNCSVFGLLLTQKGNATHDNICSGNSESTQK

SEQ ID NO: 71 - DNA, 693 bp, Artificial Sequence
  CDS (1)..(693)
  Nucleotide sequence of Fc(g1S)
cccaaatcttccgacaaaactcacacatgcccaccgtgcccagcacctgaactcctggggggaccgtcagtcttcctcttccccccaaaacccaaggacaccctcatgatctcccggacccctgaggtcacatgcgtggtggtggacgtgagccacgaagaccctgaggtcaagttcaactggtacgtggacggcgtggaggtgcataatgccaagacaaagccgcgggaggagcagtacaacagcacgtaccgtgtggtcagcgtcctcaccgtcctgcaccaggactggctgaatggcaaggagtacaagtgcaaggtctccaacaaagccctcccagcccccatcgagaaaaccatctccaaagccaaagggcagccccgagaaccacaggtgtacaccctgcccccatcccgggatgagctgaccaagaaccaggtcagcctgacctgcctggtcaaaggcttctatcccagcgacatcgccgtggagtgggagagcaatgggcagccggagaacaactacaagaccacgcctcccgtgctggactccgacggctccttcttcctctacagcaagctcaccgtggacaagagcaggtggcagcaggggaacgtcttctcatgctccgtgatgcatgaggctctgcacaaccactacacgcagaagagcctctccctgtctccgggtaaa

SEQ ID NO: 72 - protein, 231 aa, Artificial Sequence
  Amino acid sequence of Fc(g1S)
PKSSDKTHTCPPCPAPELLGGPSVFLFPPKPKDTLMISRTPEVTCVVVDVSHEDPEVKFNWYVDGVEVHNAKTKPREEQYNSTYRVVSVLTVLHQDWLNGKEYKCKVSNKALPAPIEKTISKAKGQPREPQVYTLPPSRDELTKNQVSLTCLVKGFYPSDIAVEWESNGQPENNYKTTPPVLDSDGSFFLYSKLTVDKSRWQQGNVFSCSVMHEALHNHYTQKSLSLSPGK

SEQ ID NO: 73 - DNA, 687 bp, Artificial Sequence
  CDS (1)..(687)
  Nucleotide sequence of Fc(g4PEK)
gagtccaaatatggtcccccatgcccaccatgcccagcacctgagttcgaggggggaccatcagtcttcctgttccccccaaaacccaaggacactctcatgatctcccggacccctgaggtcacgtgcgtggtggtggacgtgagccaggaagaccccgaggtccagttcaactggtacgtggatggcgtggaggtgcataatgccaagacaaagccgcgggaggagcagttcaacagcacgtaccgtgtggtcagcgtcctcaccgtcctgcaccaggactggctgaacggcaaggagtacaagtgcaaggtctccaacaaaggcctcccgtcctccatcgagaaaaccatctccaaagccaaagggcagccccgagagccacaggtgtacaccctgcccccatcccaggaggagatgaccaagaaccaggtcagcctgacctgcctggtcaaaggcttctaccccagcgacatcgccgtggagtgggagagcaatgggcagccggagaacaactacaagaccacgcctcccgtgctggactccgacggctccttcttcctctacagcaagctaaccgtggacaagagcaggtggcaggaggggaatgtcttctcatgctccgtgatgcatgaggctctgcacaaccactacacacagaagagcctctccctgtctctgggtaaa

SEQ ID NO: 74 - protein, 229 aa, Artificial Sequence
  Amino acid sequence of Fc(g4PEK)
ESKYGPPCPPCPAPEFEGGPSVFLFPPKPKDTLMISRTPEVTCVVVDVSQEDPEVQFNWYVDGVEVHNAKTKPREEQFNSTYRVVSVLTVLHQDWLNGKEYKCKVSNKGLPSSIEKTISKAKGQPREPQVYTLPPSQEEMTKNQVSLTCLVKGFYPSDIAVEWESNGQPENNYKTTPPVLDSDGSFFLYSKLTVDKSRWQEGNVFSCSVMHEALHNHYTQKSLSLSLGK

SEQ ID NO: 75 - DNA, 1209 bp, Artificial Sequence
  CDS (1)..(1209)
  Nucleotide sequence of Chimera B-Fc(IEGRMD-g1S)
gagacctttccccctaagtacctccattacgacgaagaaacaagccaccaactcctctgtgacaagtgccccccagggacatatttgaaacagcactgtaccgcaaagtggaaaacagtatgcgccccttgcccaccaagacactacactcagttttggaattacctggagagatgccgctattgtaacgttctgtgtggtgagcgtgaggaagaagctcgagcatgccatgctactcacaatcgtgcttgccggtgtagaaccggtttttttgcccatgcaggcttctgcctggaacatgcaagctgtccccctggcgctggcgttatcgcacccggaactcctagccagaatacacaatgtcagccttgccctcccggcactttttctgcctcttccagttcatcagagcaatgccagcctcacagaaactgtaccgctctggggctcgccctgaatgtccccggctcttcaagtcacgataccctgtgcaccagcatcgaggggcgcatggatcccaaatcttccgacaaaactcacacatgcccaccgtgcccagcacctgaactcctggggggaccgtcagtcttcctcttccccccaaaacccaaggacaccctcatgatctcccggacccctgaggtcacatgcgtggtggtggacgtgagccacgaagaccctgaggtcaagttcaactggtacgtggacggcgtggaggtgcataatgccaagacaaagccgcgggaggagcagtacaacagcacgtaccgtgtggtcagcgtcctcaccgtcctgcaccaggactggctgaatggcaaggagtacaagtgcaaggtctccaacaaagccctcccagcccccatcgagaaaaccatctccaaagccaaagggcagccccgagaaccacaggtgtacaccctgcccccatcccgggatgagctgaccaagaaccaggtcagcctgacctgcctggtcaaaggcttctatcccagcgacatcgccgtggagtgggagagcaatgggcagccggagaacaactacaagaccacgcctcccgtgctggactccgacggctccttcttcctctacagcaagctcaccgtggacaagagcaggtggcagcaggggaacgtcttctcatgctccgtgatgcatgaggctctgcacaaccactacacgcagaagagcctctccctgtctccgggtaaa

SEQ ID NO: 76 - protein, 403 aa, Artificial Sequence
  Amino acid sequence of Chimera B-Fc(IEGRMD-g1S)
ETFPPKYLHYDEETSHQLLCDKCPPGTYLKQHCTAKWKTVCAPCPPRHYTQFWNYLERCRYCNVLCGEREEEARACHATHNRACRCRTGFFAHAGFCLEHASCPPGAGVIAPGTPSQNTQCQPCPPGTFSASSSSSEQCQPHRNCTALGLALNVPGSSSHDTLCTSIEGRMDPKSSDKTHTCPPCPAPELLGGPSVFLFPPKPKDTLMISRTPEVTCVVVDVSHEDPEVKFNWYVDGVEVHNAKTKPREEQYNSTYRVVSVLTVLHQDWLNGKEYKCKVSNKALPAPIEKTISKAKGQPREPQVYTLPPSRDELTKNQVSLTCLVKGFYPSDIAVEWESNGQPENNYKTTPPVLDSDGSFFLYSKLTVDKSRWQQGNVFSCSVMHEALHNHYTQKSLSLSPGK

SEQ ID NO: 77 - DNA, 1230 bp, Artificial Sequence
  CDS (1)..(1230)
  Nucleotide sequence of Chimera C-Fc(IEGRMD-g1S)
gtagcagagacacccacctatccatggagggacgctgagaccggtgagcggctcgtttgcgcccaatgtccaccagggaccttcgttcagcggccctgccgacgggacagtccaacaacatgtggcccatgcccaccaagacactacactcagttttggaattacctggagagatgccgctattgtaacgttctgtgtggtgagcgtgaggaagaagctcgagcatgccatgctactcacaatcgtgcttgccggtgtagaaccggtttttttgcccatgcaggcttctgcctggaacatgcaagctgtccccctggcgctggcgttatcgcacccggaactcctagccagaatacacaatgtcagccttgccctgacggctttttctctaatgagacttcaagtaaagctccctgccgcaagcacaccaactgtagtgtgtttgggttgttgctgacccagaaggggaacgcaactcacgacaacatttgtagcgggaattcagaaagcacccaaaagatcgaggggcgcatggatcccaaatcttccgacaaaactcacacatgcccaccgtgcccagcacctgaactcctggggggaccgtcagtcttcctcttccccccaaaacccaaggacaccctcatgatctcccggacccctgaggtcacatgcgtggtggtggacgtgagccacgaagaccctgaggtcaagttcaactggtacgtggacggcgtggaggtgcataatgccaagacaaagccgcgggaggagcagtacaacagcacgtaccgtgtggtcagcgtcctcaccgtcctgcaccaggactggctgaatggcaaggagtacaagtgcaaggtctccaacaaagccctcccagcccccatcgagaaaaccatctccaaagccaaagggcagccccgagaaccacaggtgtacaccctgcccccatcccgggatgagctgaccaagaaccaggtcagcctgacctgcctggtcaaaggcttctatcccagcgacatcgccgtggagtgggagagcaatgggcagccggagaacaactacaagaccacgcctcccgtgctggactccgacggctccttcttcctctacagcaagctcaccgtggacaagagcaggtggcagcaggggaacgtcttctcatgctccgtgatgcatgaggctctgcacaaccactacacgcagaagagcctctccctgtctccgggtaaa

SEQ ID NO: 78 - protein, 410 aa, Artificial Sequence
  Amino acid sequence of Chimera C-Fc(IEGRMD-g1S)
VAETPTYPWRDAETGERLVCAQCPPGTFVQRPCRRDSPTTCGPCPPRHYTQFWNYLERCRYCNVLCGEREEEARACHATHNRACRCRTGFFAHAGFCLEHASCPPGAGVIAPGTPSQNTQCQPCPDGFFSNETSSKAPCRKHTNCSVFGLLLTQKGNATHDNICSGNSESTQKIEGRMDPKSSDKTHTCPPCPAPELLGGPSVFLFPPKPKDTLMISRTPEVTCVVVDVSHEDPEVKFNWYVDGVEVHNAKTKPREEQYNSTYRVVSVLTVLHQDWLNGKEYKCKVSNKALPAPIEKTISKAKGQPREPQVYTLPPSRDELTKNQVSLTCLVKGFYPSDIAVEWESNGQPENNYKTTPPVLDSDGSFFLYSKLTVDKSRWQQGNVFSCSVMHEALHNHYTQKSLSLSPGK

SEQ ID NO: 79 - DNA, 1230 bp, Artificial Sequence
  CDS (1)..(1230)
  Nucleotide sequence of Chimera A-Fc(IEGRMD-g1S)
gagacctttccccctaagtacctccattacgacgaagaaacaagccaccaactcctctgtgacaagtgccccccagggacatatttgaaacagcactgtaccgcaaagtggaaaacagtatgcgccccttgcccaccaagacactacactcagttttggaattacctggagagatgccgctattgtaacgttctgtgtggtgagcgtgaggaagaagctcgagcatgccatgctactcacaatcgtgcttgccggtgtagaaccggtttttttgcccatgcaggcttctgcctggaacatgcaagctgtccccctggcgctggcgttatcgcacccggaactcctagccagaatacacaatgtcagccttgccctgacggctttttctctaatgagacttcaagtaaagctccctgccgcaagcacaccaactgtagtgtgtttgggttgttgctgacccagaaggggaacgcaactcacgacaacatttgtagcgggaattcagaaagcacccaaaagatcgaggggcgcatggatcccaaatcttccgacaaaactcacacatgcccaccgtgcccagcacctgaactcctggggggaccgtcagtcttcctcttccccccaaaacccaaggacaccctcatgatctcccggacccctgaggtcacatgcgtggtggtggacgtgagccacgaagaccctgaggtcaagttcaactggtacgtggacggcgtggaggtgcataatgccaagacaaagccgcgggaggagcagtacaacagcacgtaccgtgtggtcagcgtcctcaccgtcctgcaccaggactggctgaatggcaaggagtacaagtgcaaggtctccaacaaagccctcccagcccccatcgagaaaaccatctccaaagccaaagggcagccccgagaaccacaggtgtacaccctgcccccatcccgggatgagctgaccaagaaccaggtcagcctgacctgcctggtcaaaggcttctatcccagcgacatcgccgtggagtgggagagcaatgggcagccggagaacaactacaagaccacgcctcccgtgctggactccgacggctccttcttcctctacagcaagctcaccgtggacaagagcaggtggcagcaggggaacgtcttctcatgctccgtgatgcatgaggctctgcacaaccactacacgcagaagagcctctccctgtctccgggtaaa

SEQ ID NO: 80 - protein, 410 aa, Artificial Sequence
  Amino acid sequence of Chimera A-Fc(IEGRMD-g1S)
ETFPPKYLHYDEETSHQLLCDKCPPGTYLKQHCTAKWKTVCAPCPPRHYTQFWNYLERCRYCNVLCGEREEEARACHATHNRACRCRTGFFAHAGFCLEHASCPPGAGVIAPGTPSQNTQCQPCPDGFFSNETSSKAPCRKHTNCSVFGLLLTQKGNATHDNICSGNSESTQKIEGRMDPKSSDKTHTCPPCPAPELLGGPSVFLFPPKPKDTLMISRTPEVTCVVVDVSHEDPEVKFNWYVDGVEVHNAKTKPREEQYNSTYRVVSVLTVLHQDWLNGKEYKCKVSNKALPAPIEKTISKAKGQPREPQVYTLPPSRDELTKNQVSLTCLVKGFYPSDIAVEWESNGQPENNYKTTPPVLDSDGSFFLYSKLTVDKSRWQQGNVFSCSVMHEALHNHYTQKSLSLSPGK

SEQ ID NO: 81 - DNA, 1206 bp, Artificial Sequence
  CDS (1)..(1206)
  Nucleotide sequence of Chimera A-Fc(g4PEK)
gagacctttccccctaagtacctccattacgacgaagaaacaagccaccaactcctctgtgacaagtgccccccagggacatatttgaaacagcactgtaccgcaaagtggaaaacagtatgcgccccttgcccaccaagacactacactcagttttggaattacctggagagatgccgctattgtaacgttctgtgtggtgagcgtgaggaagaagctcgagcatgccatgctactcacaatcgtgcttgccggtgtagaaccggtttttttgcccatgcaggcttctgcctggaacatgcaagctgtccccctggcgctggcgttatcgcacccggaactcctagccagaatacacaatgtcagccttgccctgacggctttttctctaatgagacttcaagtaaagctccctgccgcaagcacaccaactgtagtgtgtttgggttgttgctgacccagaaggggaacgcaactcacgacaacatttgtagcgggaattcagaaagcacccaaaaggagtccaaatatggtcccccatgcccaccatgcccagcacctgagttcgaggggggaccatcagtcttcctgttccccccaaaacccaaggacactctcatgatctcccggacccctgaggtcacgtgcgtggtggtggacgtgagccaggaagaccccgaggtccagttcaactggtacgtggatggcgtggaggtgcataatgccaagacaaagccgcgggaggagcagttcaacagcacgtaccgtgtggtcagcgtcctcaccgtcctgcaccaggactggctgaacggcaaggagtacaagtgcaaggtctccaacaaaggcctcccgtcctccatcgagaaaaccatctccaaagccaaagggcagccccgagagccacaggtgtacaccctgcccccatcccaggaggagatgaccaagaaccaggtcagcctgacctgcctggtcaaaggcttctaccccagcgacatcgccgtggagtgggagagcaatgggcagccggagaacaactacaagaccacgcctcccgtgctggactccgacggctccttcttcctctacagcaagctaaccgtggacaagagcaggtggcaggaggggaatgtcttctcatgctccgtgatgcatgaggctctgcacaaccactacacacagaagagcctctccctgtctctgggtaaa

SEQ ID NO: 82 - protein, 402 aa, Artificial Sequence
  Amino acid sequence of Chimera A-Fc(g4PEK)
ETFPPKYLHYDEETSHQLLCDKCPPGTYLKQHCTAKWKTVCAPCPPRHYTQFWNYLERCRYCNVLCGEREEEARACHATHNRACRCRTGFFAHAGFCLEHASCPPGAGVIAPGTPSQNTQCQPCPDGFFSNETSSKAPCRKHTNCSVFGLLLTQKGNATHDNICSGNSESTQKESKYGPPCPPCPAPEFEGGPSVFLFPPKPKDTLMISRTPEVTCVVVDVSQEDPEVQFNWYVDGVEVHNAKTKPREEQFNSTYRVVSVLTVLHQDWLNGKEYKCKVSNKGLPSSIEKTISKAKGQPREPQVYTLPPSQEEMTKNQVSLTCLVKGFYPSDIAVEWESNGQPENNYKTTPPVLDSDGSFFLYSKLTVDKSRWQEGNVFSCSVMHEALHNHYTQKSLSLSLGK

SEQ ID NO: 83 - DNA, 1206 bp, Artificial Sequence
  CDS (1)..(1206)
  Nucleotide sequence of 103-123OPG-Fc(g4PEK)
gagacctttccccctaagtacctccattacgacgaagaaacaagccaccaactcctctgtgacaagtgccccccagggacatatttgaaacagcactgtaccgcaaagtggaaaacagtatgcgccccttgcccaccaagacactacactcagttttggaattacctggagagatgccgctattgtaacgttctgtgtggtgagcgtgaggaagaagctcgagcatgccatgctactcacaatcgtgcttgccggtgtagaaccggtttttttgcccatgcaggcttctgcctggaacatgcaagctgtcctccaggatttggggtggtccaagcagggacacccgagcggaacaccgtatgcaaacgatgtcctgacggctttttctctaatgagacttcaagtaaagctccctgccgcaagcacaccaactgtagtgtgtttgggttgttgctgacccagaaggggaacgcaactcacgacaacatttgtagcgggaattcagaaagcacccaaaaggagtccaaatatggtcccccatgcccaccatgcccagcacctgagttcgaggggggaccatcagtcttcctgttccccccaaaacccaaggacactctcatgatctcccggacccctgaggtcacgtgcgtggtggtggacgtgagccaggaagaccccgaggtccagttcaactggtacgtggatggcgtggaggtgcataatgccaagacaaagccgcgggaggagcagttcaacagcacgtaccgtgtggtcagcgtcctcaccgtcctgcaccaggactggctgaacggcaaggagtacaagtgcaaggtctccaacaaaggcctcccgtcctccatcgagaaaaccatctccaaagccaaagggcagccccgagagccacaggtgtacaccctgcccccatcccaggaggagatgaccaagaaccaggtcagcctgacctgcctggtcaaaggcttctaccccagcgacatcgccgtggagtgggagagcaatgggcagccggagaacaactacaagaccacgcctcccgtgctggactccgacggctccttcttcctctacagcaagctaaccgtggacaagagcaggtggcaggaggggaatgtcttctcatgctccgtgatgcatgaggctctgcacaaccactacacacagaagagcctctccctgtctctgggtaaa

SEQ ID NO: 84 - protein, 402 aa, Artificial Sequence
  Amino acid sequence of 103-123OPG-Fc(g4PEK)
ETFPPKYLHYDEETSHQLLCDKCPPGTYLKQHCTAKWKTVCAPCPPRHYTQFWNYLERCRYCNVLCGEREEEARACHATHNRACRCRTGFFAHAGFCLEHASCPPGFGVVQAGTPERNTVCKRCPDGFFSNETSSKAPCRKHTNCSVFGLLLTQKGNATHDNICSGNSESTQKESKYGPPCPPCPAPEFEGGPSVFLFPPKPKDTLMISRTPEVTCVVVDVSQEDPEVQFNWYVDGVEVHNAKTKPREEQFNSTYRVVSVLTVLHQDWLNGKEYKCKVSNKGLPSSIEKTISKAKGQPREPQVYTLPPSQEEMTKNQVSLTCLVKGFYPSDIAVEWESNGQPENNYKTTPPVLDSDGSFFLYSKLTVDKSRWQEGNVFSCSVMHEALHNHYTQKSLSLSLGK

SEQ ID NO: 85 - DNA, 1206 bp, Artificial Sequence
  CDS (1)..(1206)
  Nucleotide sequence of N131S/N144S-Fc(g4PEK)
gagacctttccccctaagtacctccattacgacgaagaaacaagccaccaactcctctgtgacaagtgccccccagggacatatttgaaacagcactgtaccgcaaagtggaaaacagtatgcgccccttgcccaccaagacactacactcagttttggaattacctggagagatgccgctattgtaacgttctgtgtggtgagcgtgaggaagaagctcgagcatgccatgctactcacaatcgtgcttgccggtgtagaaccggtttttttgcccatgcaggcttctgcctggaacatgcaagctgtccccctggcgctggcgttatcgcacccggaactcctagccagaatacacaatgtcagccttgccctgacggctttttctctagtgagacttcaagtaaagctccctgccgcaagcacaccagctgtagtgtgtttgggttgttgctgacccagaaggggaacgcaactcacgacaacatttgtagcgggaattcagaaagcacccaaaaggagtccaaatatggtcccccatgcccaccatgcccagcacctgagttcgaggggggaccatcagtcttcctgttccccccaaaacccaaggacactctcatgatctcccggacccctgaggtcacgtgcgtggtggtggacgtgagccaggaagaccccgaggtccagttcaactggtacgtggatggcgtggaggtgcataatgccaagacaaagccgcgggaggagcagttcaacagcacgtaccgtgtggtcagcgtcctcaccgtcctgcaccaggactggctgaacggcaaggagtacaagtgcaaggtctccaacaaaggcctcccgtcctccatcgagaaaaccatctccaaagccaaagggcagccccgagagccacaggtgtacaccctgcccccatcccaggaggagatgaccaagaaccaggtcagcctgacctgcctggtcaaaggcttctaccccagcgacatcgccgtggagtgggagagcaatgggcagccggagaacaactacaagaccacgcctcccgtgctggactccgacggctccttcttcctctacagcaagctaaccgtggacaagagcaggtggcaggaggggaatgtcttctcatgctccgtgatgcatgaggctctgcacaaccactacacacagaagagcctctccctgtctctgggtaaa

SEQ ID NO: 86 - protein, 402 aa, Artificial Sequence
  Amino acid sequence of N131S/N144S-Fc(g4PEK)
ETFPPKYLHYDEETSHQLLCDKCPPGTYLKQHCTAKWKTVCAPCPPRHYTQFWNYLERCRYCNVLCGEREEEARACHATHNRACRCRTGFFAHAGFCLEHASCPPGAGVIAPGTPSQNTQCQPCPDGFFSSETSSKAPCRKHTSCSVFGLLLTQKGNATHDNICSGNSESTQKESKYGPPCPPCPAPEFEGGPSVFLFPPKPKDTLMISRTPEVTCVVVDVSQEDPEVQFNWYVDGVEVHNAKTKPREEQFNSTYRVVSVLTVLHQDWLNGKEYKCKVSNKGLPSSIEKTISKAKGQPREPQVYTLPPSQEEMTKNQVSLTCLVKGFYPSDIAVEWESNGQPENNYKTTPPVLDSDGSFFLYSKLTVDKSRWQEGNVFSCSVMHEALHNHYTQKSLSLSLGK

SEQ ID NO: 87 - DNA, 1206 bp, Artificial Sequence
  CDS (1)..(1206)
  Nucleotide sequence of T133A/S146A-Fc(g4PEK)
gagacctttccccctaagtacctccattacgacgaagaaacaagccaccaactcctctgtgacaagtgccccccagggacatatttgaaacagcactgtaccgcaaagtggaaaacagtatgcgccccttgcccaccaagacactacactcagttttggaattacctggagagatgccgctattgtaacgttctgtgtggtgagcgtgaggaagaagctcgagcatgccatgctactcacaatcgtgcttgccggtgtagaaccggtttttttgcccatgcaggcttctgcctggaacatgcaagctgtccccctggcgctggcgttatcgcacccggaactcctagccagaatacacaatgtcagccttgccctgacggctttttctctaatgaggcttcaagtaaagctccctgccgcaagcacaccaactgtgctgtgtttgggttgttgctgacccagaaggggaacgcaactcacgacaacatttgtagcgggaattcagaaagcacccaaaaggagtccaaatatggtcccccatgcccaccatgcccagcacctgagttcgaggggggaccatcagtcttcctgttccccccaaaacccaaggacactctcatgatctcccggacccctgaggtcacgtgcgtggtggtggacgtgagccaggaagaccccgaggtccagttcaactggtacgtggatggcgtggaggtgcataatgccaagacaaagccgcgggaggagcagttcaacagcacgtaccgtgtggtcagcgtcctcaccgtcctgcaccaggactggctgaacggcaaggagtacaagtgcaaggtctccaacaaaggcctcccgtcctccatcgagaaaaccatctccaaagccaaagggcagccccgagagccacaggtgtacaccctgcccccatcccaggaggagatgaccaagaaccaggtcagcctgacctgcctggtcaaaggcttctaccccagcgacatcgccgtggagtgggagagcaatgggcagccggagaacaactacaagaccacgcctcccgtgctggactccgacggctccttcttcctctacagcaagctaaccgtggacaagagcaggtggcaggaggggaatgtcttctcatgctccgtgatgcatgaggctctgcacaaccactacacacagaagagcctctccctgtctctgggtaaa

SEQ ID NO: 88 - protein, 402 aa, Artificial Sequence
  Amino acid sequence of T133A/S146A-Fc(g4PEK)
ETFPPKYLHYDEETSHQLLCDKCPPGTYLKQHCTAKWKTVCAPCPPRHYTQFWNYLERCRYCNVLCGEREEEARACHATHNRACRCRTGFFAHAGFCLEHASCPPGAGVIAPGTPSQNTQCQPCPDGFFSNEASSKAPCRKHTNCAVFGLLLTQKGNATHDNICSGNSESTQKESKYGPPCPPCPAPEFEGGPSVFLFPPKPKDTLMISRTPEVTCVVVDVSQEDPEVQFNWYVDGVEVHNAKTKPREEQFNSTYRVVSVLTVLHQDWLNGKEYKCKVSNKGLPSSIEKTISKAKGQPREPQVYTLPPSQEEMTKNQVSLTCLVKGFYPSDIAVEWESNGQPENNYKTTPPVLDSDGSFFLYSKLTVDKSRWQEGNVFSCSVMHEALHNHYTQKSLSLSLGK

SEQ ID NO: 89 - DNA, 1206 bp, Artificial Sequence
  CDS (1)..(1206)
  Nucleotide sequence of N131S/N144S/N157S-Fc(g4PEK)
gagacctttccccctaagtacctccattacgacgaagaaacaagccaccaactcctctgtgacaagtgccccccagggacatatttgaaacagcactgtaccgcaaagtggaaaacagtatgcgccccttgcccaccaagacactacactcagttttggaattacctggagagatgccgctattgtaacgttctgtgtggtgagcgtgaggaagaagctcgagcatgccatgctactcacaatcgtgcttgccggtgtagaaccggtttttttgcccatgcaggcttctgcctggaacatgcaagctgtccccctggcgctggcgttatcgcacccggaactcctagccagaatacacaatgtcagccttgccctgacggctttttctctagtgagacttcaagtaaagctccctgccgcaagcacaccagctgtagtgtgtttgggttgttgctgacccagaaggggagcgcaactcacgacaacatttgtagcgggaattcagaaagcacccaaaaggagtccaaatatggtcccccatgcccaccatgcccagcacctgagttcgaggggggaccatcagtcttcctgttccccccaaaacccaaggacactctcatgatctcccggacccctgaggtcacgtgcgtggtggtggacgtgagccaggaagaccccgaggtccagttcaactggtacgtggatggcgtggaggtgcataatgccaagacaaagccgcgggaggagcagttcaacagcacgtaccgtgtggtcagcgtcctcaccgtcctgcaccaggactggctgaacggcaaggagtacaagtgcaaggtctccaacaaaggcctcccgtcctccatcgagaaaaccatctccaaagccaaagggcagccccgagagccacaggtgtacaccctgcccccatcccaggaggagatgaccaagaaccaggtcagcctgacctgcctggtcaaaggcttctaccccagcgacatcgccgtggagtgggagagcaatgggcagccggagaacaactacaagaccacgcctcccgtgctggactccgacggctccttcttcctctacagcaagctaaccgtggacaagagcaggtggcaggaggggaatgtcttctcatgctccgtgatgcatgaggctctgcacaaccactacacacagaagagcctctccctgtctctgggtaaa

SEQ ID NO: 90 - protein, 402 aa, Artificial Sequence
  Amino acid sequence of N131S/N144S/N157S-Fc(g4PEK)
ETFPPKYLHYDEETSHQLLCDKCPPGTYLKQHCTAKWKTVCAPCPPRHYTQFWNYLERCRYCNVLCGEREEEARACHATHNRACRCRTGFFAHAGFCLEHASCPPGAGVIAPGTPSQNTQCQPCPDGFFSSETSSKAPCRKHTSCSVFGLLLTQKGSATHDNICSGNSESTQKESKYGPPCPPCPAPEFEGGPSVFLFPPKPKDTLMISRTPEVTCVVVDVSQEDPEVQFNWYVDGVEVHNAKTKPREEQFNSTYRVVSVLTVLHQDWLNGKEYKCKVSNKGLPSSIEKTISKAKGQPREPQVYTLPPSQEEMTKNQVSLTCLVKGFYPSDIAVEWESNGQPENNYKTTPPVLDSDGSFFLYSKLTVDKSRWQEGNVFSCSVMHEALHNHYTQKSLSLSLGK

SEQ ID NO: 91 - DNA, 1206 bp, Artificial Sequence
  CDS (1)..(1206)
  Nucleotide sequence of T133A/S146A/T159A-Fc(g4PEK)
gagacctttccccctaagtacctccattacgacgaagaaacaagccaccaactcctctgtgacaagtgccccccagggacatatttgaaacagcactgtaccgcaaagtggaaaacagtatgcgccccttgcccaccaagacactacactcagttttggaattacctggagagatgccgctattgtaacgttctgtgtggtgagcgtgaggaagaagctcgagcatgccatgctactcacaatcgtgcttgccggtgtagaaccggtttttttgcccatgcaggcttctgcctggaacatgcaagctgtccccctggcgctggcgttatcgcacccggaactcctagccagaatacacaatgtcagccttgccctgacggctttttctctaatgaggcttcaagtaaagctccctgccgcaagcacaccaactgtgctgtgtttgggttgttgctgacccagaaggggaacgcagctcacgacaacatttgtagcgggaattcagaaagcacccaaaaggagtccaaatatggtcccccatgcccaccatgcccagcacctgagttcgaggggggaccatcagtcttcctgttccccccaaaacccaaggacactctcatgatctcccggacccctgaggtcacgtgcgtggtggtggacgtgagccaggaagaccccgaggtccagttcaactggtacgtggatggcgtggaggtgcataatgccaagacaaagccgcgggaggagcagttcaacagcacgtaccgtgtggtcagcgtcctcaccgtcctgcaccaggactggctgaacggcaaggagtacaagtgcaaggtctccaacaaaggcctcccgtcctccatcgagaaaaccatctccaaagccaaagggcagccccgagagccacaggtgtacaccctgcccccatcccaggaggagatgaccaagaaccaggtcagcctgacctgcctggtcaaaggcttctaccccagcgacatcgccgtggagtgggagagcaatgggcagccggagaacaactacaagaccacgcctcccgtgctggactccgacggctccttcttcctctacagcaagctaaccgtggacaagagcaggtggcaggaggggaatgtcttctcatgctccgtgatgcatgaggctctgcacaaccactacacacagaagagcctctccctgtctctgggtaaa

SEQ ID NO: 92 - protein, 402 aa, Artificial Sequence
  Amino acid sequence of T133A/S146A/T159A-Fc(g4PEK)
ETFPPKYLHYDEETSHQLLCDKCPPGTYLKQHCTAKWKTVCAPCPPRHYTQFWNYLERCRYCNVLCGEREEEARACHATHNRACRCRTGFFAHAGFCLEHASCPPGAGVIAPGTPSQNTQCQPCPDGFFSNEASSKAPCRKHTNCAVFGLLLTQKGNAAHDNICSGNSESTQKESKYGPPCPPCPAPEFEGGPSVFLFPPKPKDTLMISRTPEVTCVVVDVSQEDPEVQFNWYVDGVEVHNAKTKPREEQFNSTYRVVSVLTVLHQDWLNGKEYKCKVSNKGLPSSIEKTISKAKGQPREPQVYTLPPSQEEMTKNQVSLTCLVKGFYPSDIAVEWESNGQPENNYKTTPPVLDSDGSFFLYSKLTVDKSRWQEGNVFSCSVMHEALHNHYTQKSLSLSLGK

SEQ ID NO: 93 - DNA, 1206 bp, Artificial Sequence
  CDS (1)..(1206)
  Nucleotide sequence of Chimera A-E57K-Fc(g4PEK)
gagacctttccccctaagtacctccattacgacgaagaaacaagccaccaactcctctgtgacaagtgccccccagggacatatttgaaacagcactgtaccgcaaagtggaaaacagtatgcgccccttgcccaccaagacactacactcagttttggaattacctgaagagatgccgctattgtaacgttctgtgtggtgagcgtgaggaagaagctcgagcatgccatgctactcacaatcgtgcttgccggtgtagaaccggtttttttgcccatgcaggcttctgcctggaacatgcaagctgtccccctggcgctggcgttatcgcacccggaactcctagccagaatacacaatgtcagccttgccctgacggctttttctctaatgagacttcaagtaaagctccctgccgcaagcacaccaactgtagtgtgtttgggttgttgctgacccagaaggggaacgcaactcacgacaacatttgtagcgggaattcagaaagcacccaaaaggagtccaaatatggtcccccatgcccaccatgcccagcacctgagttcgaggggggaccatcagtcttcctgttccccccaaaacccaaggacactctcatgatctcccggacccctgaggtcacgtgcgtggtggtggacgtgagccaggaagaccccgaggtccagttcaactggtacgtggatggcgtggaggtgcataatgccaagacaaagccgcgggaggagcagttcaacagcacgtaccgtgtggtcagcgtcctcaccgtcctgcaccaggactggctgaacggcaaggagtacaagtgcaaggtctccaacaaaggcctcccgtcctccatcgagaaaaccatctccaaagccaaagggcagccccgagagccacaggtgtacaccctgcccccatcccaggaggagatgaccaagaaccaggtcagcctgacctgcctggtcaaaggcttctaccccagcgacatcgccgtggagtgggagagcaatgggcagccggagaacaactacaagaccacgcctcccgtgctggactccgacggctccttcttcctctacagcaagctaaccgtggacaagagcaggtggcaggaggggaatgtcttctcatgctccgtgatgcatgaggctctgcacaaccactacacacagaagagcctctccctgtctctgggtaaa

SEQ ID NO: 94 - protein, 402 aa, Artificial Sequence
  Amino acid sequence of Chimera A-E57K-Fc(g4PEK)
ETFPPKYLHYDEETSHQLLCDKCPPGTYLKQHCTAKWKTVCAPCPPRHYTQFWNYLKRCRYCNVLCGEREEEARACHATHNRACRCRTGFFAHAGFCLEHASCPPGAGVIAPGTPSQNTQCQPCPDGFFSNETSSKAPCRKHTNCSVFGLLLTQKGNATHDNICSGNSESTQKESKYGPPCPPCPAPEFEGGPSVFLFPPKPKDTLMISRTPEVTCVVVDVSQEDPEVQFNWYVDGVEVHNAKTKPREEQFNSTYRVVSVLTVLHQDWLNGKEYKCKVSNKGLPSSIEKTISKAKGQPREPQVYTLPPSQEEMTKNQVSLTCLVKGFYPSDIAVEWESNGQPENNYKTTPPVLDSDGSFFLYSKLTVDKSRWQEGNVFSCSVMHEALHNHYTQKSLSLSLGK

SEQ ID NO: 95 - DNA, 1206 bp, Artificial Sequence
  CDS (1)..(1206)
  Nucleotide sequence of Chimera A-E57L-Fc(g4PEK)
gagacctttccccctaagtacctccattacgacgaagaaacaagccaccaactcctctgtgacaagtgccccccagggacatatttgaaacagcactgtaccgcaaagtggaaaacagtatgcgccccttgcccaccaagacactacactcagttttggaattacctgctgagatgccgctattgtaacgttctgtgtggtgagcgtgaggaagaagctcgagcatgccatgctactcacaatcgtgcttgccggtgtagaaccggtttttttgcccatgcaggcttctgcctggaacatgcaagctgtccccctggcgctggcgttatcgcacccggaactcctagccagaatacacaatgtcagccttgccctgacggctttttctctaatgagacttcaagtaaagctccctgccgcaagcacaccaactgtagtgtgtttgggttgttgctgacccagaaggggaacgcaactcacgacaacatttgtagcgggaattcagaaagcacccaaaaggagtccaaatatggtcccccatgcccaccatgcccagcacctgagttcgaggggggaccatcagtcttcctgttccccccaaaacccaaggacactctcatgatctcccggacccctgaggtcacgtgcgtggtggtggacgtgagccaggaagaccccgaggtccagttcaactggtacgtggatggcgtggaggtgcataatgccaagacaaagccgcgggaggagcagttcaacagcacgtaccgtgtggtcagcgtcctcaccgtcctgcaccaggactggctgaacggcaaggagtacaagtgcaaggtctccaacaaaggcctcccgtcctccatcgagaaaaccatctccaaagccaaagggcagccccgagagccacaggtgtacaccctgcccccatcccaggaggagatgaccaagaaccaggtcagcctgacctgcctggtcaaaggcttctaccccagcgacatcgccgtggagtgggagagcaatgggcagccggagaacaactacaagaccacgcctcccgtgctggactccgacggctccttcttcctctacagcaagctaaccgtggacaagagcaggtggcaggaggggaatgtcttctcatgctccgtgatgcatgaggctctgcacaaccactacacacagaagagcctctccctgtctctgggtaaa

SEQ ID NO: 96 - protein, 402 aa, Artificial Sequence
  Amino acid sequence of Chimera A-E57L-Fc(g4PEK)
ETFPPKYLHYDEETSHQLLCDKCPPGTYLKQHCTAKWKTVCAPCPPRHYTQFWNYLLRCRYCNVLCGEREEEARACHATHNRACRCRTGFFAHAGFCLEHASCPPGAGVIAPGTPSQNTQCQPCPDGFFSNETSSKAPCRKHTNCSVFGLLLTQKGNATHDNICSGNSESTQKESKYGPPCPPCPAPEFEGGPSVFLFPPKPKDTLMISRTPEVTCVVVDVSQEDPEVQFNWYVDGVEVHNAKTKPREEQFNSTYRVVSVLTVLHQDWLNGKEYKCKVSNKGLPSSIEKTISKAKGQPREPQVYTLPPSQEEMTKNQVSLTCLVKGFYPSDIAVEWESNGQPENNYKTTPPVLDSDGSFFLYSKLTVDKSRWQEGNVFSCSVMHEALHNHYTQKSLSLSLGK

SEQ ID NO: 97 - DNA, 1206 bp, Artificial Sequence
  CDS (1)..(1206)
  Nucleotide sequence of Chimera A-R60K-Fc(g4PEK)
gagacctttccccctaagtacctccattacgacgaagaaacaagccaccaactcctctgtgacaagtgccccccagggacatatttgaaacagcactgtaccgcaaagtggaaaacagtatgcgccccttgcccaccaagacactacactcagttttggaattacctggagagatgcaagtattgtaacgttctgtgtggtgagcgtgaggaagaagctcgagcatgccatgctactcacaatcgtgcttgccggtgtagaaccggtttttttgcccatgcaggcttctgcctggaacatgcaagctgtccccctggcgctggcgttatcgcacccggaactcctagccagaatacacaatgtcagccttgccctgacggctttttctctaatgagacttcaagtaaagctccctgccgcaagcacaccaactgtagtgtgtttgggttgttgctgacccagaaggggaacgcaactcacgacaacatttgtagcgggaattcagaaagcacccaaaaggagtccaaatatggtcccccatgcccaccatgcccagcacctgagttcgaggggggaccatcagtcttcctgttccccccaaaacccaaggacactctcatgatctcccggacccctgaggtcacgtgcgtggtggtggacgtgagccaggaagaccccgaggtccagttcaactggtacgtggatggcgtggaggtgcataatgccaagacaaagccgcgggaggagcagttcaacagcacgtaccgtgtggtcagcgtcctcaccgtcctgcaccaggactggctgaacggcaaggagtacaagtgcaaggtctccaacaaaggcctcccgtcctccatcgagaaaaccatctccaaagccaaagggcagccccgagagccacaggtgtacaccctgcccccatcccaggaggagatgaccaagaaccaggtcagcctgacctgcctggtcaaaggcttctaccccagcgacatcgccgtggagtgggagagcaatgggcagccggagaacaactacaagaccacgcctcccgtgctggactccgacggctccttcttcctctacagcaagctaaccgtggacaagagcaggtggcaggaggggaatgtcttctcatgctccgtgatgcatgaggctctgcacaaccactacacacagaagagcctctccctgtctctgggtaaa

SEQ ID NO: 98 - protein, 402 aa, Artificial Sequence
  Amino acid sequence of Chimera A-R60K-Fc(g4PEK)
ETFPPKYLHYDEETSHQLLCDKCPPGTYLKQHCTAKWKTVCAPCPPRHYTQFWNYLERCKYCNVLCGEREEEARACHATHNRACRCRTGFFAHAGFCLEHASCPPGAGVIAPGTPSQNTQCQPCPDGFFSNETSSKAPCRKHTNCSVFGLLLTQKGNATHDNICSGNSESTQKESKYGPPCPPCPAPEFEGGPSVFLFPPKPKDTLMISRTPEVTCVVVDVSQEDPEVQFNWYVDGVEVHNAKTKPREEQFNSTYRVVSVLTVLHQDWLNGKEYKCKVSNKGLPSSIEKTISKAKGQPREPQVYTLPPSQEEMTKNQVSLTCLVKGFYPSDIAVEWESNGQPENNYKTTPPVLDSDGSFFLYSKLTVDKSRWQEGNVFSCSVMHEALHNHYTQKSLSLSLGK

SEQ ID NO: 99 - DNA, 1524 bp, Artificial Sequence
  CDS (1)..(1524)
  Nucleotide sequence of DcR3 FL-Fc
gtggcagaaacacccacctacccctggcgggacgcagagacaggggagcggctggtgtgcgcccagtgccccccaggcacctttgtgcagcggccgtgccgccgagacagccccacgacgtgtggcccgtgtccaccgcgccactacacgcagttctggaactacctagagcgctgccgctactgcaacgtcctctgcggggagcgtgaggaggaggcacgggcttgccacgccacccacaaccgtgcctgccgctgccgcaccggcttcttcgcgcacgctggtttctgcttggagcacgcatcgtgtccacctggtgccggcgtgattgccccgggcacccccagccagaacacgcagtgccagccgtgccccccaggcaccttctcagccagcagctccagctcagagcagtgccagccccaccgcaactgcacggccctgggcctggccctcaatgtgccaggctcttcctcccatgacaccctgtgcaccagctgcactggcttccccctcagcaccagggtaccaggagctgaggagtgtgagcgtgccgtcatcgactttgtggctttccaggacatctccatcaagaggctgcagcggctgctgcaggccctcgaggccccggagggctggggtccgacaccaagggcgggccgcgcggccttgcagctgaagctgcgtcggcggctcacggagctcctgggggcgcaggacggggcgctgctggtgcggctgctgcaggcgctgcgcgtggccaggatgcccgggctggagcggagcgtccgtgagcgcttcctccctgtgcacatcgaggggcgcatggatcccaaatcttccgacaaaactcacacatgcccaccgtgcccagcacctgaactcctggggggaccgtcagtcttcctcttccccccaaaacccaaggacaccctcatgatctcccggacccctgaggtcacatgcgtggtggtggacgtgagccacgaagaccctgaggtcaagttcaactggtacgtggacggcgtggaggtgcataatgccaagacaaagccgcgggaggagcagtacaacagcacgtaccgtgtggtcagcgtcctcaccgtcctgcaccaggactggctgaatggcaaggagtacaagtgcaaggtctccaacaaagccctcccagcccccatcgagaaaaccatctccaaagccaaagggcagccccgagaaccacaggtgtacaccctgcccccatcccgggatgagctgaccaagaaccaggtcagcctgacctgcctggtcaaaggcttctatcccagcgacatcgccgtggagtgggagagcaatgggcagccggagaacaactacaagaccacgcctcccgtgctggactccgacggctccttcttcctctacagcaagctcaccgtggacaagagcaggtggcagcaggggaacgtcttctcatgctccgtgatgcatgaggctctgcacaaccactacacgcagaagagcctctccctgtctccgggtaaa

SEQ ID NO: 100 - protein, 508 aa, Artificial Sequence
  Amino acid sequence of DcR3 FL-Fc
VAETPTYPWRDAETGERLVCAQCPPGTFVQRPCRRDSPTTCGPCPPRHYTQFWNYLERCRYCNVLCGEREEEARACHATHNRACRCRTGFFAHAGFCLEHASCPPGAGVIAPGTPSQNTQCQPCPPGTFSASSSSSEQCQPHRNCTALGLALNVPGSSSHDTLCTSCTGFPLSTRVPGAEECERAVIDFVAFQDISIKRLQRLLQALEAPEGWGPTPRAGRAALQLKLRRRLTELLGAQDGALLVRLLQALRVARMPGLERSVRERFLPVHIEGRMDPKSSDKTHTCPPCPAPELLGGPSVFLFPPKPKDTLMISRTPEVTCVVVDVSHEDPEVKFNWYVDGVEVHNAKTKPREEQYNSTYRVVSVLTVLHQDWLNGKEYKCKVSNKALPAPIEKTISKAKGQPREPQVYTLPPSRDELTKNQVSLTCLVKGFYPSDIAVEWESNGQPENNYKTTPPVLDSDGSFFLYSKLTVDKSRWQQGNVFSCSVMHEALHNHYTQKSLSLSPGK

SEQ ID NO: 101 - DNA, 1209 bp, Artificial Sequence
  CDS (1)..(1209)
  Nucleotide sequence of S195-Fc
gtggcagaaacacccacctacccctggcgggacgcagagacaggggagcggctggtgtgcgcccagtgccccccaggcacctttgtgcagcggccgtgccgccgagacagccccacgacgtgtggcccgtgtccaccgcgccactacacgcagttctggaactacctagagcgctgccgctactgcaacgtcctctgcggggagcgtgaggaggaggcacgggcttgccacgccacccacaaccgtgcctgccgctgccgcaccggcttcttcgcgcacgctggtttctgcttggagcacgcatcgtgtccacctggtgccggcgtgattgccccgggcacccccagccagaacacgcagtgccagccgtgccccccaggcaccttctcagccagcagctccagctcagagcagtgccagccccaccgcaactgcacggccctgggcctggccctcaatgtgccaggctcttcctcccatgacaccctgtgcaccagcatcgaggggcgcatggatcccaaatcttccgacaaaactcacacatgcccaccgtgcccagcacctgaactcctggggggaccgtcagtcttcctcttccccccaaaacccaaggacaccctcatgatctcccggacccctgaggtcacatgcgtggtggtggacgtgagccacgaagaccctgaggtcaagttcaactggtacgtggacggcgtggaggtgcataatgccaagacaaagccgcgggaggagcagtacaacagcacgtaccgtgtggtcagcgtcctcaccgtcctgcaccaggactggctgaatggcaaggagtacaagtgcaaggtctccaacaaagccctcccagcccccatcgagaaaaccatctccaaagccaaagggcagccccgagaaccacaggtgtacaccctgcccccatcccgggatgagctgaccaagaaccaggtcagcctgacctgcctggtcaaaggcttctatcccagcgacatcgccgtggagtgggagagcaatgggcagccggagaacaactacaagaccacgcctcccgtgctggactccgacggctccttcttcctctacagcaagctcaccgtggacaagagcaggtggcagcaggggaacgtcttctcatgctccgtgatgcatgaggctctgcacaaccactacacgcagaagagcctctccctgtctccgggtaaa

SEQ ID NO: 102 - protein, 403 aa, Artificial Sequence
  Amino acid sequence of S195-Fc
VAETPTYPWRDAETGERLVCAQCPPGTFVQRPCRRDSPTTCGPCPPRHYTQFWNYLERCRYCNVLCGEREEEARACHATHNRACRCRTGFFAHAGFCLEHASCPPGAGVIAPGTPSQNTQCQPCPPGTFSASSSSSEQCQPHRNCTALGLALNVPGSSSHDTLCTSIEGRMDPKSSDKTHTCPPCPAPELLGGPSVFLFPPKPKDTLMISRTPEVTCVVVDVSHEDPEVKFNWYVDGVEVHNAKTKPREEQYNSTYRVVSVLTVLHQDWLNGKEYKCKVSNKALPAPIEKTISKAKGQPREPQVYTLPPSRDELTKNQVSLTCLVKGFYPSDIAVEWESNGQPENNYKTTPPVLDSDGSFFLYSKLTVDKSRWQQGNVFSCSVMHEALHNHYTQKSLSLSPGK

SEQ ID NO: 103 - DNA, 846 bp, Artificial Sequence
  CDS (1)..(846)
  Nucleotide sequence of DcR3 FL-FLAG
gtggcagaaacacccacctacccctggcgggacgcagagacaggggagcggctggtgtgcgcccagtgccccccaggcacctttgtgcagcggccgtgccgccgagacagccccacgacgtgtggcccgtgtccaccgcgccactacacgcagttctggaactacctagagcgctgccgctactgcaacgtcctctgcggggagcgtgaggaggaggcacgggcttgccacgccacccacaaccgtgcctgccgctgccgcaccggcttcttcgcgcacgctggtttctgcttggagcacgcatcgtgtccacctggtgccggcgtgattgccccgggcacccccagccagaacacgcagtgccagccgtgccccccaggcaccttctcagccagcagctccagctcagagcagtgccagccccaccgcaactgcacggccctgggcctggccctcaatgtgccaggctcttcctcccatgacaccctgtgcaccagctgcactggcttccccctcagcaccagggtaccaggagctgaggagtgtgagcgtgccgtcatcgactttgtggctttccaggacatctccatcaagaggctgcagcggctgctgcaggccctcgaggccccggagggctggggtccgacaccaagggcgggccgcgcggccttgcagctgaagctgcgtcggcggctcacggagctcctgggggcgcaggacggggcgctgctggtgcggctgctgcaggcgctgcgcgtggccaggatgcccgggctggagcggagcgtccgtgagcgcttcctccctgtgcacggtaccgcagactacaaggacgacgatgacaag

SEQ ID NO: 104 - protein, 282 aa, Artificial Sequence
  Amino acid sequence of DcR3 FL-FLAG
VAETPTYPWRDAETGERLVCAQCPPGTFVQRPCRRDSPTTCGPCPPRHYTQFWNYLERCRYCNVLCGEREEEARACHATHNRACRCRTGFFAHAGFCLEHASCPPGAGVIAPGTPSQNTQCQPCPPGTFSASSSSSEQCQPHRNCTALGLALNVPGSSSHDTLCTSCTGFPLSTRVPGAEECERAVIDFVAFQDISIKRLQRLLQALEAPEGWGPTPRAGRAALQLKLRRRLTELLGAQDGALLVRLLQALRVARMPGLERSVRERFLPVHGTADYKDDDDK

SEQ ID NO: 105 - DNA, 18 bp, Artificial Sequence
  CDS (1)..(18)
  Nucleotide sequence of Linker IEGRMD
atcgaggggcgcatggat

SEQ ID NO: 106 - protein, 6 aa, Artificial Sequence
  Amino acid sequence of Linker IEGRMD
IEGRMD

SEQ ID NO: 107 - DNA, 498 bp, Artificial Sequence
  CDS (1)..(498)
  Nucleotide sequence of DcR3 from which HBD has been deleted (without a signal peptide)
gtggcagaaacacccacctacccctggcgggacgcagagacaggggagcggctggtgtgcgcccagtgccccccaggcacctttgtgcagcggccgtgccgccgagacagccccacgacgtgtggcccgtgtccaccgcgccactacacgcagttctggaactacctagagcgctgccgctactgcaacgtcctctgcggggagcgtgaggaggaggcacgggcttgccacgccacccacaaccgtgcctgccgctgccgcaccggcttcttcgcgcacgctggtttctgcttggagcacgcatcgtgtccacctggtgccggcgtgattgccccgggcacccccagccagaacacgcagtgccagccgtgccccccaggcaccttctcagccagcagctccagctcagagcagtgccagccccaccgcaactgcacggccctgggcctggccctcaatgtgccaggctcttcctcccatgacaccctgtgcaccagc

SEQ ID NO: 108 - protein, 166 aa, Artificial Sequence
  Amino acid sequence of DcR3 from which HBD has been deleted (without a signal peptide)
VAETPTYPWRDAETGERLVCAQCPPGTFVQRPCRRDSPTTCGPCPPRHYTQFWNYLERCRYCNVLCGEREEEARACHATHNRACRCRTGFFAHAGFCLEHASCPPGAGVIAPGTPSQNTQCQPCPPGTFSASSSSSEQCQPHRNCTALGLALNVPGSSSHDTLCTS

SEQ ID NO: 109 - DNA, 24 bp, Artificial Sequence
  CDS (1)..(24)
  Nucleotide sequence of FLAG tag
gactacaaggacgacgatgacaag

SEQ ID NO: 110 - protein, 8 aa, Artificial Sequence
  Amino acid sequence of FLAG tag
DYKDDDDK

SEQ ID NO: 111 - DNA, 813 bp, Artificial Sequence
  CDS (1)..(813)
  Nucleotide sequence of R218Q DcR3
gtggcagaaacacccacctacccctggcgggacgcagagacaggggagcggctggtgtgcgcccagtgccccccaggcacctttgtgcagcggccgtgccgccgagacagccccacgacgtgtggcccgtgtccaccgcgccactacacgcagttctggaactacctagagcgctgccgctactgcaacgtcctctgcggggagcgtgaggaggaggcacgggcttgccacgccacccacaaccgtgcctgccgctgccgcaccggcttcttcgcgcacgctggtttctgcttggagcacgcatcgtgtccacctggtgccggcgtgattgccccgggcacccccagccagaacacgcagtgccagccgtgccccccaggcaccttctcagccagcagctccagctcagagcagtgccagccccaccgcaactgcacggccctgggcctggccctcaatgtgccaggctcttcctcccatgacaccctgtgcaccagctgcactggcttccccctcagcaccagggtaccaggagctgaggagtgtgagcgtgccgtcatcgactttgtggctttccaggacatctccatcaagaggctgcagcggctgctgcaggccctcgaggccccggagggctggggtccgacaccacaggcgggccgcgcggccttgcagctgaagctgcgtcggcggctcacggagctcctgggggcgcaggacggggcgctgctggtgcggctgctgcaggcgctgcgcgtggccaggatgcccgggctggagcggagcgtccgtgagcgcttcctccctgtgcac

SEQ ID NO: 112 - protein, 271 aa, Artificial Sequence
  Amino acid sequence of R218Q DcR3
VAETPTYPWRDAETGERLVCAQCPPGTFVQRPCRRDSPTTCGPCPPRHYTQFWNYLERCRYCNVLCGEREEEARACHATHNRACRCRTGFFAHAGFCLEHASCPPGAGVIAPGTPSQNTQCQPCPPGTFSASSSSSEQCQPHRNCTALGLALNVPGSSSHDTLCTSCTGFPLSTRVPGAEECERAVIDFVAFQDISIKRLQRLLQALEAPEGWGPTPQAGRAALQLKLRRRLTELLGAQDGALLVRLLQALRVARMPGLERSVRERFLPVH

SEQ ID NO: 113 - DNA, 579 bp, Homo sapiens
  CDS (1)..(579)
  Nucleotide sequence of soluble recombinant of human LIGHT
catcatcatcatcatcatcatcatcatcatggtggtggtagtggtggtggtagtggtggtggtagtatcgagggacgggacggacctgcaggctcctgggagcagctgatacaagagcgaaggtctcacgaggtcaacccagcagcgcatctcacaggggccaactccagcttgaccggcagcggggggccgctgttatgggagactcagctgggcctggccttcctgaggggcctcagctaccacgatggggcccttgtggtcaccaaagctggctactactacatctactccaaggtgcagctgggcggtgtgggctgcccgctgggcctggccagcaccatcacccacggcctctacaagcgcacaccccgctaccccgaggagctggagctgttggtcagccagcagtcaccctgcggacgggccaccagcagctcccgggtctggtgggacagcagcttcctgggtggtgtggtacacctggaggctggggagaaggtggtcgtccgtgtgctggatgaacgcctggttcgactgcgtgatggtacccggtcttacttcggggctttcatggtg

SEQ ID NO: 114 - protein, 193 aa, Homo sapiens
  Amino acid sequence of soluble recombinant of human LIGHT
HHHHHHHHHHGGGSGGGSGGGSIEGRDGPAGSWEQLIQERRSHEVNPAAHLTGANSSLTGSGGPLLWETQLGLAFLRGLSYHDGALVVTKAGYYYIYSKVQLGGVGCPLGLASTITHGLYKRTPRYPEELELLVSQQSPCGRATSSSRVWWDSSFLGGVVHLEAGEKVVVRVLDERLVRLRDGTRSYFGAFMV

SEQ ID NO: 115 - DNA, 594 bp, Homo sapiens
  CDS (1)..(594)
  Nucleotide sequence of soluble recombinant of human TL1A
catcatcatcatcatcatggtggtggtagtggtggtggtagtggtggtggtagtctaaaaggacaggagtttgcaccttcacatcagcaagtttatgcacctcttagagcagacggagataagccaagggcacacctgacagttgtgagacaaactcccacacagcactttaaaaatcagttcccagctctgcactgggaacatgaactaggcctggccttcaccaagaaccgaatgaactataccaacaaattcctgctgatcccagagtcgggagactacttcatttactcccaggtcacattccgtgggatgacctctgagtgcagtgaaatcagacaagcaggccgaccaaacaagccagactccatcactgtggtcatcaccaaggtaacagacagctaccctgagccaacccagctcctcatggggaccaagtctgtatgcgaagtaggtagcaactggttccagcccatctacctcggagccatgttctccttgcaagaaggggacaagctaatggtgaacgtcagtgacatctctttggtggattacacaaaagaagataaaaccttctttggagccttcttacta

SEQ ID NO: 116 - protein, 198 aa, Homo sapiens
  Amino acid sequence of soluble recombinant of human TL1A
HHHHHHGGGSGGGSGGGSLKGQEFAPSHQQVYAPLRADGDKPRAHLTVVRQTPTQHFKNQFPALHWEHELGLAFTKNRMNYTNKFLLIPESGDYFIYSQVTFRGMTSECSEIRQAGRPNKPDSITVVITKVTDSYPEPTQLLMGTKSVCEVGSNWFQPIYLGAMFSLQEGDKLMVNVSDISLVDYTKEDKTFFGAFLL

SEQ ID NO: 117 - DNA, 462 bp, Homo sapiens
  CDS (1)..(462)
  Nucleotide sequence of soluble recombinant of human FasL
catcatcatcatcatcatcccagtccaccccctgaaaaaaaggagctgaggaaagtggcccatttaacaggcaagtccaactcaaggtccatgcctctggaatgggaagacacctatggaattgtcctgctttctggagtgaagtataagaagggtggccttgtgatcaatgaaactgggctgtactttgtatattccaaagtatacttccggggtcaatcttgcaacaacctgcccctgagccacaaggtctacatgaggaactctaagtatccccaggatctggtgatgatggaggggaagatgatgagctactgcactactgggcagatgtgggcccgcagcagctacctgggggcagtgttcaatcttaccagtgctgatcatttatatgtcaacgtatctgagctctctctggtcaattttgaggaatctcagacgtttttcggcttatataagctc

SEQ ID NO: 118 - protein, 154 aa, Homo sapiens
  Amino acid sequence of soluble recombinant of human FasL
HHHHHHPSPPPEKKELRKVAHLTGKSNSRSMPLEWEDTYGIVLLSGVKYKKGGLVINETGLYFVYSKVYFRGQSCNNLPLSHKVYMRNSKYPQDLVMMEGKMMSYCTTGQMWARSSYLGAVFNLTSADHLYVNVSELSLVNFEESQTFFGLYKL

SEQ ID NO: 119 - DNA, 579 bp, Macaca fascicularis
  CDS (1)..(579)
  Nucleotide sequence of soluble recombinant of Macaca fascicularis LIGHT
catcatcatcatcatcatcatcatcatcatggtggtggtagtggtggtggtagtggtggtggtagtatcgagggacgggacggacacggaggctcctgggagcagctgatacaagagcgaaggtctcaccagaataacccagcagcacatctcacaggggccaactccagcttgacgggcagcgggggaccgctgctatgggagacccagctgggcctggccttcctgaggggcctcgactaccacgatggggcccttgtggccaacaaggctggctactactacatctactccaaggtgcagctgggcggtgtgggctgcccgctgggcctggccagcaccatcacccacggcctctacaagcgcacgccccgctaccccgaggagctggagctgttggtcagccagcagtcaccctgcggacgggccaccagcaactcccgcgtctggtgggacagcagcttcctgggtggtgtggtgcacctggaggttggggaggaggtggtcgtccgtgtgctggatgagcgcctggtccgactgcgtgatggcacccggtcttacttcggggctttcatggtg

SEQ ID NO: 120 - protein, 193 aa, Macaca fascicularis
  Amino acid sequence of soluble recombinant of Macaca fascicularis LIGHT
HHHHHHHHHHGGGSGGGSGGGSIEGRDGHGGSWEQLIQERRSHQNNPAAHLTGANSSLTGSGGPLLWETQLGLAFLRGLDYHDGALVANKAGYYYIYSKVQLGGVGCPLGLASTITHGLYKRTPRYPEELELLVSQQSPCGRATSNSRVWWDSSFLGGVVHLEVGEEVVVRVLDERLVRLRDGTRSYFGAFMV

SEQ ID NO: 121 - DNA, 594 bp, Macaca fascicularis
  CDS (1)..(594)
  Nucleotide sequence of soluble recombinant of Macaca fascicularis TL1A
catcatcatcatcatcatggtggtggtagtggtggtggtagtggtggtggtagtctaaaaggacaggagtttgcaccttcacatcagcaagtttatgcacctcttagagcagatggagataagccaagggcacacctgacagttgtgagacaaactcccacacagcacttaaaaaatcagttcccagctctgcactgggaacatgaactaggcctggccttcaccaagaaccgaatgaactataccaacaaattcctgctgatcccagagtcgggagactacttcgtttactcccaggtcacattccgtgggatgacctctgagtgcagtgaaatcagacaagcaggccgaccaaacaagccagactccatcactgtggtcatcaccaaggtaacagacagctaccctgagccaacccagctcctcatggggaccaagtctgtgtgtgaagtaggcagtaactggttccagcccatctacctcggagccatgttctccttgcaagaaggggacaagctcatggtgaacgtcagtgacatctctttggtggattacacaaaagaagataaaaccttctttggagccttcttacta

SEQ ID NO: 122 - protein, 198 aa, Macaca fascicularis
  Amino acid sequence of soluble recombinant of Macaca fascicularis TL1A
HHHHHHGGGSGGGSGGGSLKGQEFAPSHQQVYAPLRADGDKPRAHLTVVRQTPTQHLKNQFPALHWEHELGLAFTKNRMNYTNKFLLIPESGDYFVYSQVTFRGMTSECSEIRQAGRPNKPDSITVVITKVTDSYPEPTQLLMGTKSVCEVGSNWFQPIYLGAMFSLQEGDKLMVNVSDISLVDYTKEDKTFFGAFLL

SEQ ID NO: 123 - DNA, 462 bp, Macaca fascicularis
  CDS (1)..(462)
  Nucleotide sequence of soluble recombinant of Macaca fascicularis FasL
catcatcatcatcatcatcccagtccaccccctgagaaaaaggagcagaggaaagtggcccatttaacaggcaagcccaactcaaggtccatgcctctggaatgggaagacacctatggaattgtcctgctttctggagtgaagtataagaagggtggccttgtgatcaatgaaactgggctgtactttgtatattccaaagtatacttccggggtcaatcttgcaccaacctgcccctgagccacaaggtctacatgaggaactctaagtatccccaggatctggtgatgatggaggggaagatgatgagctactgcactactgggcagatgtgggcccacagcagctacctgggggcagtgttcaatcttaccagtgctgatcatttatatgtcaatgtatctgagctctctctggtcaattttgaggaatctcagacattttttggcctatataagctc

SEQ ID NO: 124 - protein, 154 aa, Macaca fascicularis
  Amino acid sequence of soluble recombinant of Macaca fascicularis FasL
HHHHHHPSPPPEKKEQRKVAHLTGKPNSRSMPLEWEDTYGIVLLSGVKYKKGGLVINETGLYFVYSKVYFRGQSCTNLPLSHKVYMRNSKYPQDLVMMEGKMMSYCTTGQMWAHSSYLGAVFNLTSADHLYVNVSELSLVNFEESQTFFGLYKL

SEQ ID NO: 125 - DNA, 582 bp, Mus musculus
  CDS (1)..(582)
  Nucleotide sequence of soluble recombinant of mouse LIGHT
catcatcatcatcatcatcatcatcatcatggtggtggtagtggtggtggtagtggtggtggtagtatcgagggacgggatggaggcaaaggctcctgggagaagctgatacaagatcaacgatctcaccaggccaacccagcagcacatcttacaggagccaacgccagcttgataggtattggtggacctctgttatgggagacacgacttggcctggccttcttgaggggcttgacgtatcatgatggggccctggtgaccatggagcccggttactactatgtgtactccaaagtgcagctgagcggcgtgggctgcccccaggggctggccaatggcctccccatcacccatggactatacaagcgcacatcccgctacccgaaggagttagaactgctggtcagtcggcggtcaccctgtggccgggccaacagctcccgagtctggtgggacagcagcttcctgggcggcgtggtacatctggaggctggggaagaggtggtggtccgcgtgcctggaaaccgcctggtcagaccacgtgacggcaccaggtcctatttcggagctttcatggtc

SEQ ID NO: 126 - protein, 194 aa, Mus musculus
  Amino acid sequence of soluble recombinant of mouse LIGHT
HHHHHHHHHHGGGSGGGSGGGSIEGRDGGKGSWEKLIQDQRSHQANPAAHLTGANASLIGIGGPLLWETRLGLAFLRGLTYHDGALVTMEPGYYYVYSKVQLSGVGCPQGLANGLPITHGLYKRTSRYPKELELLVSRRSPCGRANSSRVWWDSSFLGGVVHLEAGEEVVVRVPGNRLVRPRDGTRSYFGAFMV

SEQ ID NO: 127 - DNA, 585 bp, Mus musculus
  CDS (1)..(585)
  Nucleotide sequence of soluble recombinant of mouse TL1A
catcatcatcatcatcatggtggtggtagtggtggtggtagtggtggtggtagtataacagaagagaggtctgagccttcaccacagcaagtttactcacctcccagaggcaagccgagagcacacctgacaattaagaaacaaaccccagcaccacatctgaaaaatcagctctctgctctacactgggaacatgacctagggatggccttcaccaagaacgggatgaagtacatcaacaaatccctggtgatcccagagtcaggagactatttcatctactcccagatcacattccgagggaccacatctgtgtgtggtgacatcagtcgggggagacgaccaaacaagccagactccatcaccatggttatcaccaaggtagcagacagctaccctgagcctgcccgcctactaacagggtccaagtctgtgtgtgaaataagcaacaactggttccagtccctctaccttggggccacgttctccttggaagaaggagacagactaatggtaaacgtcagtgacatctccttggtggattacacaaaagaagataaaactttctttggagctttcttgcta

SEQ ID NO: 128 - protein, 195 aa, Mus musculus
  Amino acid sequence of soluble recombinant of mouse TL1A
HHHHHHGGGSGGGSGGGSITEERSEPSPQQVYSPPRGKPRAHLTIKKQTPAPHLKNQLSALHWEHDLGMAFTKNGMKYINKSLVIPESGDYFIYSQITFRGTTSVCGDISRGRRPNKPDSITMVITKVADSYPEPARLLTGSKSVCEISNNWFQSLYLGATFSLEEGDRLMVNVSDISLVDYTKEDKTFFGAFLL

SEQ ID NO: 129 - DNA, 462 bp, Mus musculus
  CDS (1)..(462)
  Nucleotide sequence of soluble recombinant of mouse FasL
catcatcatcatcatcatcccagtacaccctctgaaaaaaaagagccgaggagtgtggcccatttaacagggaacccccactcaaggtccatccctctggaatgggaagacacatatggaaccgctctgatctctggagtgaagtataagaaaggtggccttgtgatcaacgaaactgggttgtacttcgtgtattccaaagtatacttccggggtcagtcttgcaacaaccagcccctaaaccacaaggtctatatgaggaactctaagtatcctgaggatctggtgctaatggaggagaagaggttgaactactgcactactggacagatatgggcccacagcagctacctgggggcagtattcaatcttaccagtgctgaccatttatatgtcaacatatctcaactctctctgatcaattttgaggaatctaagacctttttcggcttatataagctc

SEQ ID NO: 130 - protein, 154 aa, Mus musculus
  Amino acid sequence of soluble recombinant of mouse FasL
HHHHHHPSTPSEKKEPRSVAHLTGNPHSRSIPLEWEDTYGTALISGVKYKKGGLVINETGLYFVYSKVYFRGQSCNNQPLNHKVYMRNSKYPEDLVLMEEKRLNYCTTGQIWAHSSYLGAVFNLTSADHLYVNISQLSLINFEESKTFFGLYKL

SEQ ID NO: 131 - DNA, 501 bp, Homo sapiens
  CDS (1)..(501)
  Nucleotide sequence of extracellular region of human LIGHT (Asp74-Val240)
gacggacctgcaggctcctgggagcagctgatacaagagcgaaggtctcacgaggtcaacccagcagcgcatctcacaggggccaactccagcttgaccggcagcggggggccgctgttatgggagactcagctgggcctggccttcctgaggggcctcagctaccacgatggggcccttgtggtcaccaaagctggctactactacatctactccaaggtgcagctgggcggtgtgggctgcccgctgggcctggccagcaccatcacccacggcctctacaagcgcacaccccgctaccccgaggagctggagctgttggtcagccagcagtcaccctgcggacgggccaccagcagctcccgggtctggtgggacagcagcttcctgggtggtgtggtacacctggaggctggggagaaggtggtcgtccgtgtgctggatgaacgcctggttcgactgcgtgatggtacccggtcttacttcggggctttcatggtg

SEQ ID NO: 132 - protein, 167 aa, Homo sapiens
  Amino acid sequence of extracellular region of human LIGHT (Asp74-Val240)
DGPAGSWEQLIQERRSHEVNPAAHLTGANSSLTGSGGPLLWETQLGLAFLRGLSYHDGALVVTKAGYYYIYSKVQLGGVGCPLGLASTITHGLYKRTPRYPEELELLVSQQSPCGRATSSSRVWWDSSFLGGVVHLEAGEKVVVRVLDERLVRLRDGTRSYFGAFMV

SEQ ID NO: 133 - DNA, 501 bp, Macaca fascicularis
  CDS (1)..(501)
  Nucleotide sequence of extracellular region of Macaca fascicularis LIGHT (Asp74-Val240)
gacggacacggaggctcctgggagcagctgatacaagagcgaaggtctcaccagaataacccagcagcacatctcacaggggccaactccagcttgacgggcagcgggggaccgctgctatgggagacccagctgggcctggccttcctgaggggcctcgactaccacgatggggcccttgtggccaacaaggctggctactactacatctactccaaggtgcagctgggcggtgtgggctgcccgctgggcctggccagcaccatcacccacggcctctacaagcgcacgccccgctaccccgaggagctggagctgttggtcagccagcagtcaccctgcggacgggccaccagcaactcccgcgtctggtgggacagcagcttcctgggtggtgtggtgcacctggaggttggggaggaggtggtcgtccgtgtgctggatgagcgcctggtccgactgcgtgatggcacccggtcttacttcggggctttcatggtg

SEQ ID NO: 134 - protein, 167 aa, Macaca fascicularis
  Amino acid sequence of extracellular region of Macaca fascicularis LIGHT (Asp74-Val240)
DGHGGSWEQLIQERRSHQNNPAAHLTGANSSLTGSGGPLLWETQLGLAFLRGLDYHDGALVANKAGYYYIYSKVQLGGVGCPLGLASTITHGLYKRTPRYPEELELLVSQQSPCGRATSNSRVWWDSSFLGGVVHLEVGEEVVVRVLDERLVRLRDGTRSYFGAFMV

SEQ ID NO: 135 - DNA, 504 bp, Mus musculus
  CDS (1)..(504)
  Nucleotide sequence of extracellular region of mouse LIGHT (Asp74-Val240)
gatggaggcaaaggctcctgggagaagctgatacaagatcaacgatctcaccaggccaacccagcagcacatcttacaggagccaacgccagcttgataggtattggtggacctctgttatgggagacacgacttggcctggccttcttgaggggcttgacgtatcatgatggggccctggtgaccatggagcccggttactactatgtgtactccaaagtgcagctgagcggcgtgggctgcccccaggggctggccaatggcctccccatcacccatggactatacaagcgcacatcccgctacccgaaggagttagaactgctggtcagtcggcggtcaccctgtggccgggccaacagctcccgagtctggtgggacagcagcttcctgggcggcgtggtacatctggaggctggggaagaggtggtggtccgcgtgcctggaaaccgcctggtcagaccacgtgacggcaccaggtcctatttcggagctttcatggtc

SEQ ID NO: 136 - protein, 168 aa, Mus musculus
  Amino acid sequence of extracellular region of mouse LIGHT (Asp74-Val240)
DGGKGSWEKLIQDQRSHQANPAAHLTGANASLIGIGGPLLWETRLGLAFLRGLTYHDGALVTMEPGYYYVYSKVQLSGVGCPQGLANGLPITHGLYKRTSRYPKELELLVSRRSPCGRANSSRVWWDSSFLGGVVHLEAGEEVVVRVPGNRLVRPRDGTRSYFGAFMV

SEQ ID NO: 137 - DNA, 540 bp, Homo sapiens
  CDS (1)..(540)
  Nucleotide sequence of extracellular region of human TL1A (Leu72-Leu251)
ctaaaaggacaggagtttgcaccttcacatcagcaagtttatgcacctcttagagcagacggagataagccaagggcacacctgacagttgtgagacaaactcccacacagcactttaaaaatcagttcccagctctgcactgggaacatgaactaggcctggccttcaccaagaaccgaatgaactataccaacaaattcctgctgatcccagagtcgggagactacttcatttactcccaggtcacattccgtgggatgacctctgagtgcagtgaaatcagacaagcaggccgaccaaacaagccagactccatcactgtggtcatcaccaaggtaacagacagctaccctgagccaacccagctcctcatggggaccaagtctgtatgcgaagtaggtagcaactggttccagcccatctacctcggagccatgttctccttgcaagaaggggacaagctaatggtgaacgtcagtgacatctctttggtggattacacaaaagaagataaaaccttctttggagccttcttacta

SEQ ID NO: 138 - protein, 180 aa, Homo sapiens
  Amino acid sequence of extracellular region of human TL1A (Leu72-Leu251)
LKGQEFAPSHQQVYAPLRADGDKPRAHLTVVRQTPTQHFKNQFPALHWEHELGLAFTKNRMNYTNKFLLIPESGDYFIYSQVTFRGMTSECSEIRQAGRPNKPDSITVVITKVTDSYPEPTQLLMGTKSVCEVGSNWFQPIYLGAMFSLQEGDKLMVNVSDISLVDYTKEDKTFFGAFLL

SEQ ID NO: 139 - DNA, 540 bp, Macaca fascicularis
  CDS (1)..(540)
  Nucleotide sequence of extracellular region of Macaca fascicularis TL1A (Leu72-Leu251)
ctaaaaggacaggagtttgcaccttcacatcagcaagtttatgcacctcttagagcagatggagataagccaagggcacacctgacagttgtgagacaaactcccacacagcacttaaaaaatcagttcccagctctgcactgggaacatgaactaggcctggccttcaccaagaaccgaatgaactataccaacaaattcctgctgatcccagagtcgggagactacttcgtttactcccaggtcacattccgtgggatgacctctgagtgcagtgaaatcagacaagcaggccgaccaaacaagccagactccatcactgtggtcatcaccaaggtaacagacagctaccctgagccaacccagctcctcatggggaccaagtctgtgtgtgaagtaggcagtaactggttccagcccatctacctcggagccatgttctccttgcaagaaggggacaagctcatggtgaacgtcagtgacatctctttggtggattacacaaaagaagataaaaccttctttggagccttcttacta

SEQ ID NO: 140 - protein, 180 aa, Macaca fascicularis
  Amino acid sequence of extracellular region of Macaca fascicularis TL1A (Leu72-Leu251)
LKGQEFAPSHQQVYAPLRADGDKPRAHLTVVRQTPTQHLKNQFPALHWEHELGLAFTKNRMNYTNKFLLIPESGDYFVYSQVTFRGMTSECSEIRQAGRPNKPDSITVVITKVTDSYPEPTQLLMGTKSVCEVGSNWFQPIYLGAMFSLQEGDKLMVNVSDISLVDYTKEDKTFFGAFLL

SEQ ID NO: 141 - DNA, 531 bp, Mus musculus
  CDS (1)..(531)
  Nucleotide sequence of extracellular region of mouse TL1A (Ile94-Leu270)
ataacagaagagaggtctgagccttcaccacagcaagtttactcacctcccagaggcaagccgagagcacacctgacaattaagaaacaaaccccagcaccacatctgaaaaatcagctctctgctctacactgggaacatgacctagggatggccttcaccaagaacgggatgaagtacatcaacaaatccctggtgatcccagagtcaggagactatttcatctactcccagatcacattccgagggaccacatctgtgtgtggtgacatcagtcgggggagacgaccaaacaagccagactccatcaccatggttatcaccaaggtagcagacagctaccctgagcctgcccgcctactaacagggtccaagtctgtgtgtgaaataagcaacaactggttccagtccctctaccttggggccacgttctccttggaagaaggagacagactaatggtaaacgtcagtgacatctccttggtggattacacaaaagaagataaaactttctttggagctttcttgcta

SEQ ID NO: 142 - protein, 177 aa, Mus musculus
  Amino acid sequence of extracellular region of mouse TL1A (Ile94-Leu270)
ITEERSEPSPQQVYSPPRGKPRAHLTIKKQTPAPHLKNQLSALHWEHDLGMAFTKNGMKYINKSLVIPESGDYFIYSQITFRGTTSVCGDISRGRRPNKPDSITMVITKVADSYPEPARLLTGSKSVCEISNNWFQSLYLGATFSLEEGDRLMVNVSDISLVDYTKEDKTFFGAFLL

SEQ ID NO: 143 - DNA, 444 bp, Homo sapiens
  CDS (1)..(444)
  Nucleotide sequence of extracellular region of human FasL (Pro134-Leu281)
cccagtccaccccctgaaaaaaaggagctgaggaaagtggcccatttaacaggcaagtccaactcaaggtccatgcctctggaatgggaagacacctatggaattgtcctgctttctggagtgaagtataagaagggtggccttgtgatcaatgaaactgggctgtactttgtatattccaaagtatacttccggggtcaatcttgcaacaacctgcccctgagccacaaggtctacatgaggaactctaagtatccccaggatctggtgatgatggaggggaagatgatgagctactgcactactgggcagatgtgggcccgcagcagctacctgggggcagtgttcaatcttaccagtgctgatcatttatatgtcaacgtatctgagctctctctggtcaattttgaggaatctcagacgtttttcggcttatataagctc

SEQ ID NO: 144 - protein, 148 aa, Homo sapiens
  Amino acid sequence of extracellular region of human FasL (Pro134-Leu281)
PSPPPEKKELRKVAHLTGKSNSRSMPLEWEDTYGIVLLSGVKYKKGGLVINETGLYFVYSKVYFRGQSCNNLPLSHKVYMRNSKYPQDLVMMEGKMMSYCTTGQMWARSSYLGAVFNLTSADHLYVNVSELSLVNFEESQTFFGLYKL

SEQ ID NO: 145 - DNA, 444 bp, Macaca fascicularis
  CDS (1)..(444)
  Nucleotide sequence of extracellular region of Macaca fascicularis FasL (Pro133-Leu280)
cccagtccaccccctgagaaaaaggagcagaggaaagtggcccatttaacaggcaagcccaactcaaggtccatgcctctggaatgggaagacacctatggaattgtcctgctttctggagtgaagtataagaagggtggccttgtgatcaatgaaactgggctgtactttgtatattccaaagtatacttccggggtcaatcttgcaccaacctgcccctgagccacaaggtctacatgaggaactctaagtatccccaggatctggtgatgatggaggggaagatgatgagctactgcactactgggcagatgtgggcccacagcagctacctgggggcagtgttcaatcttaccagtgctgatcatttatatgtcaatgtatctgagctctctctggtcaattttgaggaatctcagacattttttggcctatataagctc

SEQ ID NO: 146 - protein, 148 aa, Macaca fascicularis
  Nucleotide sequence of extracellular region of Macaca fascicularis FasL (Pro133-Leu280)
PSPPPEKKEQRKVAHLTGKPNSRSMPLEWEDTYGIVLLSGVKYKKGGLVINETGLYFVYSKVYFRGQSCTNLPLSHKVYMRNSKYPQDLVMMEGKMMSYCTTGQMWAHSSYLGAVFNLTSADHLYVNVSELSLVNFEESQTFFGLYKL

SEQ ID NO: 147 - DNA, 444 bp, Mus musculus
  CDS (1)..(444)
  Nucleotide sequence of extracellular region of mouse FasL (Pro132-Leu279)
cccagtacaccctctgaaaaaaaagagccgaggagtgtggcccatttaacagggaacccccactcaaggtccatccctctggaatgggaagacacatatggaaccgctctgatctctggagtgaagtataagaaaggtggccttgtgatcaacgaaactgggttgtacttcgtgtattccaaagtatacttccggggtcagtcttgcaacaaccagcccctaaaccacaaggtctatatgaggaactctaagtatcctgaggatctggtgctaatggaggagaagaggttgaactactgcactactggacagatatgggcccacagcagctacctgggggcagtattcaatcttaccagtgctgaccatttatatgtcaacatatctcaactctctctgatcaattttgaggaatctaagacctttttcggcttatataagctc

SEQ ID NO: 148 - protein, 148 aa, Mus musculus
  Amino acid sequence of extracellular region of mouse FasL (Pro132-Leu279)
PSTPSEKKEPRSVAHLTGNPHSRSIPLEWEDTYGTALISGVKYKKGGLVINETGLYFVYSKVYFRGQSCNNQPLNHKVYMRNSKYPEDLVLMEEKRLNYCTTGQIWAHSSYLGAVFNLTSADHLYVNISQLSLINFEESKTFFGLYKL

SEQ ID NO: 149 - DNA, 1212 bp, Artificial Sequence
  CDS (1)..(1212)
  Nucleotide sequence of Chimera A-Fc(g1S)
gagacctttccccctaagtacctccattacgacgaagaaacaagccaccaactcctctgtgacaagtgccccccagggacatatttgaaacagcactgtaccgcaaagtggaaaacagtatgcgccccttgcccaccaagacactacactcagttttggaattacctggagagatgccgctattgtaacgttctgtgtggtgagcgtgaggaagaagctcgagcatgccatgctactcacaatcgtgcttgccggtgtagaaccggtttttttgcccatgcaggcttctgcctggaacatgcaagctgtccccctggcgctggcgttatcgcacccggaactcctagccagaatacacaatgtcagccttgccctgacggctttttctctaatgagacttcaagtaaagctccctgccgcaagcacaccaactgtagtgtgtttgggttgttgctgacccagaaggggaacgcaactcacgacaacatttgtagcgggaattcagaaagcacccaaaagcccaaatcttccgacaaaactcacacatgcccaccgtgcccagcacctgaactcctggggggaccgtcagtcttcctcttccccccaaaacccaaggacaccctcatgatctcccggacccctgaggtcacatgcgtggtggtggacgtgagccacgaagaccctgaggtcaagttcaactggtacgtggacggcgtggaggtgcataatgccaagacaaagccgcgggaggagcagtacaacagcacgtaccgtgtggtcagcgtcctcaccgtcctgcaccaggactggctgaatggcaaggagtacaagtgcaaggtctccaacaaagccctcccagcccccatcgagaaaaccatctccaaagccaaagggcagccccgagaaccacaggtgtacaccctgcccccatcccgggatgagctgaccaagaaccaggtcagcctgacctgcctggtcaaaggcttctatcccagcgacatcgccgtggagtgggagagcaatgggcagccggagaacaactacaagaccacgcctcccgtgctggactccgacggctccttcttcctctacagcaagctcaccgtggacaagagcaggtggcagcaggggaacgtcttctcatgctccgtgatgcatgaggctctgcacaaccactacacgcagaagagcctctccctgtctccgggtaaa

SEQ ID NO: 150 - protein, 404 aa, Artificial Sequence
  Amino acid sequence of Chimera A-Fc(g1S)
ETFPPKYLHYDEETSHQLLCDKCPPGTYLKQHCTAKWKTVCAPCPPRHYTQFWNYLERCRYCNVLCGEREEEARACHATHNRACRCRTGFFAHAGFCLEHASCPPGAGVIAPGTPSQNTQCQPCPDGFFSNETSSKAPCRKHTNCSVFGLLLTQKGNATHDNICSGNSESTQKPKSSDKTHTCPPCPAPELLGGPSVFLFPPKPKDTLMISRTPEVTCVVVDVSHEDPEVKFNWYVDGVEVHNAKTKPREEQYNSTYRVVSVLTVLHQDWLNGKEYKCKVSNKALPAPIEKTISKAKGQPREPQVYTLPPSRDELTKNQVSLTCLVKGFYPSDIAVEWESNGQPENNYKTTPPVLDSDGSFFLYSKLTVDKSRWQQGNVFSCSVMHEALHNHYTQKSLSLSPGK

SEQ ID NO: 151 - DNA, 1293 bp, Artificial Sequence
  CDS (1)..(1293)
  Nucleotide sequence of OPG K194-Fc
atgaacaacttgctgtgctgcgcgctcgtgtttctggacatctccattaagtggaccacccaggaaacgtttcctccaaagtaccttcattatgacgaagaaacctctcatcagctgttgtgtgacaaatgtcctcctggtacctacctaaaacaacactgtacagcaaagtggaagaccgtgtgcgccccttgccctgaccactactacacagacagctggcacaccagtgacgagtgtctatactgcagccccgtgtgcaaggagctgcagtacgtcaagcaggagtgcaatcgcacccacaaccgcgtgtgcgaatgcaaggaagggcgctaccttgagatagagttctgcttgaaacataggagctgccctcctggatttggagtggtgcaagctggaaccccagagcgaaatacagtttgcaaaagatgtccagatgggttcttctcaaatgagacgtcatctaaagcaccctgtagaaaacacacaaattgcagtgtctttggtctcctgctaactcagaaaggaaatgcaacacacgacaacatatgttccggaaacagtgaatcaactcaaaaaatcgaggggcgcatggatcccaaatcttccgacaaaactcacacatgcccaccgtgcccagcacctgaactcctggggggaccgtcagtcttcctcttccccccaaaacccaaggacaccctcatgatctcccggacccctgaggtcacatgcgtggtggtggacgtgagccacgaagaccctgaggtcaagttcaactggtacgtggacggcgtggaggtgcataatgccaagacaaagccgcgggaggagcagtacaacagcacgtaccgtgtggtcagcgtcctcaccgtcctgcaccaggactggctgaatggcaaggagtacaagtgcaaggtctccaacaaagccctcccagcccccatcgagaaaaccatctccaaagccaaagggcagccccgagaaccacaggtgtacaccctgcccccatcccgggatgagctgaccaagaaccaggtcagcctgacctgcctggtcaaaggcttctatcccagcgacatcgccgtggagtgggagagcaatgggcagccggagaacaactacaagaccacgcctcccgtgctggactccgacggctccttcttcctctacagcaagctcaccgtggacaagagcaggtggcagcaggggaacgtcttctcatgctccgtgatgcatgaggctctgcacaaccactacacgcagaagagcctctccctgtctccgggtaaa

SEQ ID NO: 152 - protein, 431 aa, Artificial Sequence
  Amino acid sequence of OPG K194-Fc
MNNLLCCALVFLDISIKWTTQETFPPKYLHYDEETSHQLLCDKCPPGTYLKQHCTAKWKTVCAPCPDHYYTDSWHTSDECLYCSPVCKELQYVKQECNRTHNRVCECKEGRYLEIEFCLKHRSCPPGFGVVQAGTPERNTVCKRCPDGFFSNETSSKAPCRKHTNCSVFGLLLTQKGNATHDNICSGNSESTQKIEGRMDPKSSDKTHTCPPCPAPELLGGPSVFLFPPKPKDTLMISRTPEVTCVVVDVSHEDPEVKFNWYVDGVEVHNAKTKPREEQYNSTYRVVSVLTVLHQDWLNGKEYKCKVSNKALPAPIEKTISKAKGQPREPQVYTLPPSRDELTKNQVSLTCLVKGFYPSDIAVEWESNGQPENNYKTTPPVLDSDGSFFLYSKLTVDKSRWQQGNVFSCSVMHEALHNHYTQKSLSLSPGK

SEQ ID NO: 153 - protein, 330 aa, Homo sapiens [sequence omitted]

SEQ ID NO: 154 - protein, 327 aa, Homo sapiens
  PEPTIDE (1)..(327)
  Amino acid sequence of heavy chain constant region of human IgG4
ASTKGPSVFPLAPCSRSTSESTAALGCLVKDYFPEPVTVSWNSGALTSGVHTFPAVLQSSGLYSLSSVVTVPSSSLGTKTYTCNVDHKPSNTKVDKRVESKYGPPCPSCPAPEFLGGPSVFLFPPKPKDTLMISRTPEVTCVVVDVSQEDPEVQFNWYVDGVEVHNAKTKPREEQFNSTYRVVSVLTVLHQDWLNGKEYKCKVSNKGLPSSIEKTISKAKGQPREPQVYTLPPSQEEMTKNQVSLTCLVKGFYPSDIAVEWESNGQPENNYKTTPPVLDSDGSFFLYSRLTVDKSRWQEGNVFSCSVMHEALHNHYTQKSLSLSLGK

SEQ ID NO: 155 - DNA, 696 bp, Artificial Sequence
  CDS (1)..(696)
  Nucleotide sequence of Fc(Eg1S)
gagcccaaatcttccgacaaaactcacacatgcccaccgtgcccagcacctgaactcctggggggaccgtcagtcttcctcttccccccaaaacccaaggacaccctcatgatctcccggacccctgaggtcacatgcgtggtggtggacgtgagccacgaagaccctgaggtcaagttcaactggtacgtggacggcgtggaggtgcataatgccaagacaaagccgcgggaggagcagtacaacagcacgtaccgtgtggtcagcgtcctcaccgtcctgcaccaggactggctgaatggcaaggagtacaagtgcaaggtctccaacaaagccctcccagcccccatcgagaaaaccatctccaaagccaaagggcagccccgagaaccacaggtgtacaccctgcccccatcccgggatgagctgaccaagaaccaggtcagcctgacctgcctggtcaaaggcttctatcccagcgacatcgccgtggagtgggagagcaatgggcagccggagaacaactacaagaccacgcctcccgtgctggactccgacggctccttcttcctctacagcaagctcaccgtggacaagagcaggtggcagcaggggaacgtcttctcatgctccgtgatgcatgaggctctgcacaaccactacacgcagaagagcctctccctgtctccgggtaaa

SEQ ID NO: 156 - protein, 232 aa, Artificial Sequence
  Amino acid sequence of Fc(Eg1S)
EPKSSDKTHTCPPCPAPELLGGPSVFLFPPKPKDTLMISRTPEVTCVVVDVSHEDPEVKFNWYVDGVEVHNAKTKPREEQYNSTYRVVSVLTVLHQDWLNGKEYKCKVSNKALPAPIEKTISKAKGQPREPQVYTLPPSRDELTKNQVSLTCLVKGFYPSDIAVEWESNGQPENNYKTTPPVLDSDGSFFLYSKLTVDKSRWQQGNVFSCSVMHEALHNHYTQKSLSLSPGK

SEQ ID NO: 157 - DNA, 696 bp, Artificial Sequence
  CDS (1)..(696)
  Nucleotide sequence of Fc(Eg1S-YTE)
gagcccaaatcttccgacaaaactcacacatgcccaccgtgcccagcacctgaactcctggggggaccgtcagtcttcctcttccccccaaaacccaaggacaccctctatatcactcgggagcctgaggtcacatgcgtggtggtggacgtgagccacgaagaccctgaggtcaagttcaactggtacgtggacggcgtggaggtgcataatgccaagacaaagccgcgggaggagcagtacaacagcacgtaccgtgtggtcagcgtcctcaccgtcctgcaccaggactggctgaatggcaaggagtacaagtgcaaggtctccaacaaagccctcccagcccccatcgagaaaaccatctccaaagccaaagggcagccccgagaaccacaggtgtacaccctgcccccatcccgggatgagctgaccaagaaccaggtcagcctgacctgcctggtcaaaggcttctatcccagcgacatcgccgtggagtgggagagcaatgggcagccggagaacaactacaagaccacgcctcccgtgctggactccgacggctccttcttcctctacagcaagctcaccgtggacaagagcaggtggcagcaggggaacgtcttctcatgctccgtgatgcatgaggctctgcacaaccactacacgcagaagagcctctccctgtctccgggtaaa

SEQ ID NO: 158 - protein, 232 aa, Artificial Sequence
  Amino acid sequence of Fc(Eg1S-YTE)
EPKSSDKTHTCPPCPAPELLGGPSVFLFPPKPKDTLYITREPEVTCVVVDVSHEDPEVKFNWYVDGVEVHNAKTKPREEQYNSTYRVVSVLTVLHQDWLNGKEYKCKVSNKALPAPIEKTISKAKGQPREPQVYTLPPSRDELTKNQVSLTCLVKGFYPSDIAVEWESNGQPENNYKTTPPVLDSDGSFFLYSKLTVDKSRWQQGNVFSCSVMHEALHNHYTQKSLSLSPGK

SEQ ID NO: 159 - DNA, 696 bp, Artificial Sequence
  CDS (1)..(696)
  Nucleotide sequence of Fc(Eg1S-N434A)
gagcccaaatcttccgacaaaactcacacatgcccaccgtgcccagcacctgaactcctggggggaccgtcagtcttcctcttccccccaaaacccaaggacaccctcatgatctcccggacccctgaggtcacatgcgtggtggtggacgtgagccacgaagaccctgaggtcaagttcaactggtacgtggacggcgtggaggtgcataatgccaagacaaagccgcgggaggagcagtacaacagcacgtaccgtgtggtcagcgtcctcaccgtcctgcaccaggactggctgaatggcaaggagtacaagtgcaaggtctccaacaaagccctcccagcccccatcgagaaaaccatctccaaagccaaagggcagccccgagaaccacaggtgtacaccctgcccccatcccgggatgagctgaccaagaaccaggtcagcctgacctgcctggtcaaaggcttctatcccagcgacatcgccgtggagtgggagagcaatgggcagccggagaacaactacaagaccacgcctcccgtgctggactccgacggctccttcttcctctacagcaagctcaccgtggacaagagcaggtggcagcaggggaacgtcttctcatgctccgtgatgcatgaggctctgcacgcccactacacgcagaagagcctctccctgtctccgggtaaa

SEQ ID NO: 160 - protein, 232 aa, Artificial Sequence
  Amino acid sequence of Fc(Eg1S-N434A)
EPKSSDKTHTCPPCPAPELLGGPSVFLFPPKPKDTLMISRTPEVTCVVVDVSHEDPEVKFNWYVDGVEVHNAKTKPREEQYNSTYRVVSVLTVLHQDWLNGKEYKCKVSNKALPAPIEKTISKAKGQPREPQVYTLPPSRDELTKNQVSLTCLVKGFYPSDIAVEWESNGQPENNYKTTPPVLDSDGSFFLYSKLTVDKSRWQQGNVFSCSVMHEALHAHYTQKSLSLSPGK

SEQ ID NO: 161 - DNA, 693 bp, Artificial Sequence
  CDS (1)..(693)
  Nucleotide sequence of Fc(g1S-LALAGA)
cccaaatcttccgacaaaactcacacatgcccaccgtgcccagcacctgaagccgctggggccccgtcagtcttcctcttccccccaaaacccaaggacaccctcatgatctcccggacccctgaggtcacatgcgtggtggtggacgtgagccacgaagaccctgaggtcaagttcaactggtacgtggacggcgtggaggtgcataatgccaagacaaagccgcgggaggagcagtacaacagcacgtaccgtgtggtcagcgtcctcaccgtcctgcaccaggactggctgaatggcaaggagtacaagtgcaaggtctccaacaaagccctcccagcccccatcgagaaaaccatctccaaagccaaagggcagccccgagaaccacaggtgtacaccctgcccccatcccgggatgagctgaccaagaaccaggtcagcctgacctgcctggtcaaaggcttctatcccagcgacatcgccgtggagtgggagagcaatgggcagccggagaacaactacaagaccacgcctcccgtgctggactccgacggctccttcttcctctacagcaagctcaccgtggacaagagcaggtggcagcaggggaacgtcttctcatgctccgtgatgcatgaggctctgcacaaccactacacgcagaagagcctctccctgtctccgggcaaa

SEQ ID NO: 162 - protein, 231 aa, Artificial Sequence
  Amino acid sequence of Fc(g1S-LALAGA)
PKSSDKTHTCPPCPAPEAAGAPSVFLFPPKPKDTLMISRTPEVTCVVVDVSHEDPEVKFNWYVDGVEVHNAKTKPREEQYNSTYRVVSVLTVLHQDWLNGKEYKCKVSNKALPAPIEKTISKAKGQPREPQVYTLPPSRDELTKNQVSLTCLVKGFYPSDIAVEWESNGQPENNYKTTPPVLDSDGSFFLYSKLTVDKSRWQQGNVFSCSVMHEALHNHYTQKSLSLSPGK

SEQ ID NO: 163 - DNA, 696 bp, Artificial Sequence
  CDS (1)..(696)
  Nucleotide sequence of Fc(Eg1S-LALAGA)
gagcccaaatcttccgacaaaactcacacatgcccaccgtgcccagcacctgaagccgctggggccccgtcagtcttcctcttccccccaaaacccaaggacaccctcatgatctcccggacccctgaggtcacatgcgtggtggtggacgtgagccacgaagaccctgaggtcaagttcaactggtacgtggacggcgtggaggtgcataatgccaagacaaagccgcgggaggagcagtacaacagcacgtaccgtgtggtcagcgtcctcaccgtcctgcaccaggactggctgaatggcaaggagtacaagtgcaaggtctccaacaaagccctcccagcccccatcgagaaaaccatctccaaagccaaagggcagccccgagaaccacaggtgtacaccctgcccccatcccgggatgagctgaccaagaaccaggtcagcctgacctgcctggtcaaaggcttctatcccagcgacatcgccgtggagtgggagagcaatgggcagccggagaacaactacaagaccacgcctcccgtgctggactccgacggctccttcttcctctacagcaagctcaccgtggacaagagcaggtggcagcaggggaacgtcttctcatgctccgtgatgcatgaggctctgcacaaccactacacgcagaagagcctctccctgtctccgggcaaa

SEQ ID NO: 164 - protein, 232 aa, Artificial Sequence
  Amino acid sequence of Fc(Eg1S-LALAGA)
EPKSSDKTHTCPPCPAPEAAGAPSVFLFPPKPKDTLMISRTPEVTCVVVDVSHEDPEVKFNWYVDGVEVHNAKTKPREEQYNSTYRVVSVLTVLHQDWLNGKEYKCKVSNKALPAPIEKTISKAKGQPREPQVYTLPPSRDELTKNQVSLTCLVKGFYPSDIAVEWESNGQPENNYKTTPPVLDSDGSFFLYSKLTVDKSRWQQGNVFSCSVMHEALHNHYTQKSLSLSPGK

SEQ ID NO: 165 - DNA, 696 bp, Artificial Sequence
  CDS (1)..(696)
  Nucleotide sequence of Fc(Eg1S-LALAGANA)
gagcccaaatcttccgacaaaactcacacatgcccaccgtgcccagcacctgaagccgctggggccccgtcagtcttcctcttccccccaaaacccaaggacaccctcatgatctcccggacccctgaggtcacatgcgtggtggtggacgtgagccacgaagaccctgaggtcaagttcaactggtacgtggacggcgtggaggtgcataatgccaagacaaagccgcgggaggagcagtacaacagcacgtaccgtgtggtcagcgtcctcaccgtcctgcaccaggactggctgaatggcaaggagtacaagtgcaaggtctccaacaaagccctcccagcccccatcgagaaaaccatctccaaagccaaagggcagccccgagaaccacaggtgtacaccctgcccccatcccgggatgagctgaccaagaaccaggtcagcctgacctgcctggtcaaaggcttctatcccagcgacatcgccgtggagtgggagagcaatgggcagccggagaacaactacaagaccacgcctcccgtgctggactccgacggctccttcttcctctacagcaagctcaccgtggacaagagcaggtggcagcaggggaacgtcttctcatgctccgtgatgcatgaggctctgcacgcccactacacgcagaagagcctctccctgtctccgggtaaa

SEQ ID NO: 166 - protein, 232 aa, Artificial Sequence
  Amino acid sequence of Fc(Eg1S-LALAGANA)
EPKSSDKTHTCPPCPAPEAAGAPSVFLFPPKPKDTLMISRTPEVTCVVVDVSHEDPEVKFNWYVDGVEVHNAKTKPREEQYNSTYRVVSVLTVLHQDWLNGKEYKCKVSNKALPAPIEKTISKAKGQPREPQVYTLPPSRDELTKNQVSLTCLVKGFYPSDIAVEWESNGQPENNYKTTPPVLDSDGSFFLYSKLTVDKSRWQQGNVFSCSVMHEALHAHYTQKSLSLSPGK

SEQ ID NO: 167 - DNA, 1215 bp, Artificial Sequence
  CDS (1)..(1215)
  Nucleotide sequence of Chimera A-Fc(Eg1S)
gagacctttccccctaagtacctccattacgacgaagaaacaagccaccaactcctctgtgacaagtgccccccagggacatatttgaaacagcactgtaccgcaaagtggaaaacagtatgcgccccttgcccaccaagacactacactcagttttggaattacctggagagatgccgctattgtaacgttctgtgtggtgagcgtgaggaagaagctcgagcatgccatgctactcacaatcgtgcttgccggtgtagaaccggtttttttgcccatgcaggcttctgcctggaacatgcaagctgtccccctggcgctggcgttatcgcacccggaactcctagccagaatacacaatgtcagccttgccctgacggctttttctctaatgagacttcaagtaaagctccctgccgcaagcacaccaactgtagtgtgtttgggttgttgctgacccagaaggggaacgcaactcacgacaacatttgtagcgggaattcagaaagcacccaaaaggagcccaaatcttccgacaaaactcacacatgcccaccgtgcccagcacctgaactcctggggggaccgtcagtcttcctcttccccccaaaacccaaggacaccctcatgatctcccggacccctgaggtcacatgcgtggtggtggacgtgagccacgaagaccctgaggtcaagttcaactggtacgtggacggcgtggaggtgcataatgccaagacaaagccgcgggaggagcagtacaacagcacgtaccgtgtggtcagcgtcctcaccgtcctgcaccaggactggctgaatggcaaggagtacaagtgcaaggtctccaacaaagccctcccagcccccatcgagaaaaccatctccaaagccaaagggcagccccgagaaccacaggtgtacaccctgcccccatcccgggatgagctgaccaagaaccaggtcagcctgacctgcctggtcaaaggcttctatcccagcgacatcgccgtggagtgggagagcaatgggcagccggagaacaactacaagaccacgcctcccgtgctggactccgacggctccttcttcctctacagcaagctcaccgtggacaagagcaggtggcagcaggggaacgtcttctcatgctccgtgatgcatgaggctctgcacaaccactacacgcagaagagcctctccctgtctccgggtaaa

SEQ ID NO: 168 - protein, 405 aa, Artificial Sequence
  Amino acid sequence of Chimera A-Fc(Eg1S)
ETFPPKYLHYDEETSHQLLCDKCPPGTYLKQHCTAKWKTVCAPCPPRHYTQFWNYLERCRYCNVLCGEREEEARACHATHNRACRCRTGFFAHAGFCLEHASCPPGAGVIAPGTPSQNTQCQPCPDGFFSNETSSKAPCRKHTNCSVFGLLLTQKGNATHDNICSGNSESTQKEPKSSDKTHTCPPCPAPELLGGPSVFLFPPKPKDTLMISRTPEVTCVVVDVSHEDPEVKFNWYVDGVEVHNAKTKPREEQYNSTYRVVSVLTVLHQDWLNGKEYKCKVSNKALPAPIEKTISKAKGQPREPQVYTLPPSRDELTKNQVSLTCLVKGFYPSDIAVEWESNGQPENNYKTTPPVLDSDGSFFLYSKLTVDKSRWQQGNVFSCSVMHEALHNHYTQKSLSLSPGK

SEQ ID NO: 169 - DNA, 1215 bp, Artificial Sequence
  CDS (1)..(1215)
  Nucleotide sequence of Chimera A-Fc(Eg1S-YTE)
gagacctttccccctaagtacctccattacgacgaagaaacaagccaccaactcctctgtgacaagtgccccccagggacatatttgaaacagcactgtaccgcaaagtggaaaacagtatgcgccccttgcccaccaagacactacactcagttttggaattacctggagagatgccgctattgtaacgttctgtgtggtgagcgtgaggaagaagctcgagcatgccatgctactcacaatcgtgcttgccggtgtagaaccggtttttttgcccatgcaggcttctgcctggaacatgcaagctgtccccctggcgctggcgttatcgcacccggaactcctagccagaatacacaatgtcagccttgccctgacggctttttctctaatgagacttcaagtaaagctccctgccgcaagcacaccaactgtagtgtgtttgggttgttgctgacccagaaggggaacgcaactcacgacaacatttgtagcgggaattcagaaagcacccaaaaggagcccaaatcttccgacaaaactcacacatgcccaccgtgcccagcacctgaactcctggggggaccgtcagtcttcctcttccccccaaaacccaaggacaccctctatatcactcgggagcctgaggtcacatgcgtggtggtggacgtgagccacgaagaccctgaggtcaagttcaactggtacgtggacggcgtggaggtgcataatgccaagacaaagccgcgggaggagcagtacaacagcacgtaccgtgtggtcagcgtcctcaccgtcctgcaccaggactggctgaatggcaaggagtacaagtgcaaggtctccaacaaagccctcccagcccccatcgagaaaaccatctccaaagccaaagggcagccccgagaaccacaggtgtacaccctgcccccatcccgggatgagctgaccaagaaccaggtcagcctgacctgcctggtcaaaggcttctatcccagcgacatcgccgtggagtgggagagcaatgggcagccggagaacaactacaagaccacgcctcccgtgctggactccgacggctccttcttcctctacagcaagctcaccgtggacaagagcaggtggcagcaggggaacgtcttctcatgctccgtgatgcatgaggctctgcacaaccactacacgcagaagagcctctccctgtctccgggtaaa

SEQ ID NO: 170 - protein, 405 aa, Artificial Sequence
  Amino acid sequence of Chimera A-Fc(Eg1S-YTE)
ETFPPKYLHYDEETSHQLLCDKCPPGTYLKQHCTAKWKTVCAPCPPRHYTQFWNYLERCRYCNVLCGEREEEARACHATHNRACRCRTGFFAHAGFCLEHASCPPGAGVIAPGTPSQNTQCQPCPDGFFSNETSSKAPCRKHTNCSVFGLLLTQKGNATHDNICSGNSESTQKEPKSSDKTHTCPPCPAPELLGGPSVFLFPPKPKDTLYITREPEVTCVVVDVSHEDPEVKFNWYVDGVEVHNAKTKPREEQYNSTYRVVSVLTVLHQDWLNGKEYKCKVSNKALPAPIEKTISKAKGQPREPQVYTLPPSRDELTKNQVSLTCLVKGFYPSDIAVEWESNGQPENNYKTTPPVLDSDGSFFLYSKLTVDKSRWQQGNVFSCSVMHEALHNHYTQKSLSLSPGK

SEQ ID NO: 171 - DNA, 1215 bp, Artificial Sequence
  CDS (1)..(1215)
  Nucleotide sequence of Chimera A-Fc(Eg1S-N434A)
gagacctttccccctaagtacctccattacgacgaagaaacaagccaccaactcctctgtgacaagtgccccccagggacatatttgaaacagcactgtaccgcaaagtggaaaacagtatgcgccccttgcccaccaagacactacactcagttttggaattacctggagagatgccgctattgtaacgttctgtgtggtgagcgtgaggaagaagctcgagcatgccatgctactcacaatcgtgcttgccggtgtagaaccggtttttttgcccatgcaggcttctgcctggaacatgcaagctgtccccctggcgctggcgttatcgcacccggaactcctagccagaatacacaatgtcagccttgccctgacggctttttctctaatgagacttcaagtaaagctccctgccgcaagcacaccaactgtagtgtgtttgggttgttgctgacccagaaggggaacgcaactcacgacaacatttgtagcgggaattcagaaagcacccaaaaggagcccaaatcttccgacaaaactcacacatgcccaccgtgcccagcacctgaactcctggggggaccgtcagtcttcctcttccccccaaaacccaaggacaccctcatgatctcccggacccctgaggtcacatgcgtggtggtggacgtgagccacgaagaccctgaggtcaagttcaactggtacgtggacggcgtggaggtgcataatgccaagacaaagccgcgggaggagcagtacaacagcacgtaccgtgtggtcagcgtcctcaccgtcctgcaccaggactggctgaatggcaaggagtacaagtgcaaggtctccaacaaagccctcccagcccccatcgagaaaaccatctccaaagccaaagggcagccccgagaaccacaggtgtacaccctgcccccatcccgggatgagctgaccaagaaccaggtcagcctgacctgcctggtcaaaggcttctatcccagcgacatcgccgtggagtgggagagcaatgggcagccggagaacaactacaagaccacgcctcccgtgctggactccgacggctccttcttcctctacagcaagctcaccgtggacaagagcaggtggcagcaggggaacgtcttctcatgctccgtgatgcatgaggctctgcacgcccactacacgcagaagagcctctccctgtctccgggtaaa

SEQ ID NO: 172 - protein, 405 aa, Artificial Sequence
  Amino acid sequence of Chimera A-Fc(Eg1S-N434A)
ETFPPKYLHYDEETSHQLLCDKCPPGTYLKQHCTAKWKTVCAPCPPRHYTQFWNYLERCRYCNVLCGEREEEARACHATHNRACRCRTGFFAHAGFCLEHASCPPGAGVIAPGTPSQNTQCQPCPDGFFSNETSSKAPCRKHTNCSVFGLLLTQKGNATHDNICSGNSESTQKEPKSSDKTHTCPPCPAPELLGGPSVFLFPPKPKDTLMISRTPEVTCVVVDVSHEDPEVKFNWYVDGVEVHNAKTKPREEQYNSTYRVVSVLTVLHQDWLNGKEYKCKVSNKALPAPIEKTISKAKGQPREPQVYTLPPSRDELTKNQVSLTCLVKGFYPSDIAVEWESNGQPENNYKTTPPVLDSDGSFFLYSKLTVDKSRWQQGNVFSCSVMHEALHAHYTQKSLSLSPGK

SEQ ID NO: 173 - DNA, 1212 bp, Artificial Sequence
  CDS (1)..(1212)
  Nucleotide sequence of Chimera A-Fc(g1S-LALAGA)
gagacctttccccctaagtacctccattacgacgaagaaacaagccaccaactcctctgtgacaagtgccccccagggacatatttgaaacagcactgtaccgcaaagtggaaaacagtatgcgccccttgcccaccaagacactacactcagttttggaattacctggagagatgccgctattgtaacgttctgtgtggtgagcgtgaggaagaagctcgagcatgccatgctactcacaatcgtgcttgccggtgtagaaccggtttttttgcccatgcaggcttctgcctggaacatgcaagctgtccccctggcgctggcgttatcgcacccggaactcctagccagaatacacaatgtcagccttgccctgacggctttttctctaatgagacttcaagtaaagctccctgccgcaagcacaccaactgtagtgtgtttgggttgttgctgacccagaaggggaacgcaactcacgacaacatttgtagcgggaattcagaaagcacccaaaagcccaaatcttccgacaaaactcacacatgcccaccgtgcccagcacctgaagccgctggggccccgtcagtcttcctcttccccccaaaacccaaggacaccctcatgatctcccggacccctgaggtcacatgcgtggtggtggacgtgagccacgaagaccctgaggtcaagttcaactggtacgtggacggcgtggaggtgcataatgccaagacaaagccgcgggaggagcagtacaacagcacgtaccgtgtggtcagcgtcctcaccgtcctgcaccaggactggctgaatggcaaggagtacaagtgcaaggtctccaacaaagccctcccagcccccatcgagaaaaccatctccaaagccaaagggcagccccgagaaccacaggtgtacaccctgcccccatcccgggatgagctgaccaagaaccaggtcagcctgacctgcctggtcaaaggcttctatcccagcgacatcgccgtggagtgggagagcaatgggcagccggagaacaactacaagaccacgcctcccgtgctggactccgacggctccttcttcctctacagcaagctcaccgtggacaagagcaggtggcagcaggggaacgtcttctcatgctccgtgatgcatgaggctctgcacaaccactacacgcagaagagcctctccctgtctccgggcaaa

SEQ ID NO: 174 - protein, 404 aa, Artificial Sequence
  Amino acid sequence of Chimera A-Fc(g1S-LALAGA)
ETFPPKYLHYDEETSHQLLCDKCPPGTYLKQHCTAKWKTVCAPCPPRHYTQFWNYLERCRYCNVLCGEREEEARACHATHNRACRCRTGFFAHAGFCLEHASCPPGAGVIAPGTPSQNTQCQPCPDGFFSNETSSKAPCRKHTNCSVFGLLLTQKGNATHDNICSGNSESTQKPKSSDKTHTCPPCPAPEAAGAPSVFLFPPKPKDTLMISRTPEVTCVVVDVSHEDPEVKFNWYVDGVEVHNAKTKPREEQYNSTYRVVSVLTVLHQDWLNGKEYKCKVSNKALPAPIEKTISKAKGQPREPQVYTLPPSRDELTKNQVSLTCLVKGFYPSDIAVEWESNGQPENNYKTTPPVLDSDGSFFLYSKLTVDKSRWQQGNVFSCSVMHEALHNHYTQKSLSLSPGK

SEQ ID NO: 175 - DNA, 1215 bp, Artificial Sequence
  CDS (1)..(1215)
  Nucleotide sequence of Chimera A-Fc(Eg1S-LALAGA)
gagacctttccccctaagtacctccattacgacgaagaaacaagccaccaactcctctgtgacaagtgccccccagggacatatttgaaacagcactgtaccgcaaagtggaaaacagtatgcgccccttgcccaccaagacactacactcagttttggaattacctggagagatgccgctattgtaacgttctgtgtggtgagcgtgaggaagaagctcgagcatgccatgctactcacaatcgtgcttgccggtgtagaaccggtttttttgcccatgcaggcttctgcctggaacatgcaagctgtccccctggcgctggcgttatcgcacccggaactcctagccagaatacacaatgtcagccttgccctgacggctttttctctaatgagacttcaagtaaagctccctgccgcaagcacaccaactgtagtgtgtttgggttgttgctgacccagaaggggaacgcaactcacgacaacatttgtagcgggaattcagaaagcacccaaaaggagcccaaatcttccgacaaaactcacacatgcccaccgtgcccagcacctgaagccgctggggccccgtcagtcttcctcttccccccaaaacccaaggacaccctcatgatctcccggacccctgaggtcacatgcgtggtggtggacgtgagccacgaagaccctgaggtcaagttcaactggtacgtggacggcgtggaggtgcataatgccaagacaaagccgcgggaggagcagtacaacagcacgtaccgtgtggtcagcgtcctcaccgtcctgcaccaggactggctgaatggcaaggagtacaagtgcaaggtctccaacaaagccctcccagcccccatcgagaaaaccatctccaaagccaaagggcagccccgagaaccacaggtgtacaccctgcccccatcccgggatgagctgaccaagaaccaggtcagcctgacctgcctggtcaaaggcttctatcccagcgacatcgccgtggagtgggagagcaatgggcagccggagaacaactacaagaccacgcctcccgtgctggactccgacggctccttcttcctctacagcaagctcaccgtggacaagagcaggtggcagcaggggaacgtcttctcatgctccgtgatgcatgaggctctgcacaaccactacacgcagaagagcctctccctgtctccgggcaaa

SEQ ID NO: 176 - protein, 405 aa, Artificial Sequence
  Amino acid sequence of Chimera A-Fc(Eg1S-LALAGA)
ETFPPKYLHYDEETSHQLLCDKCPPGTYLKQHCTAKWKTVCAPCPPRHYTQFWNYLERCRYCNVLCGEREEEARACHATHNRACRCRTGFFAHAGFCLEHASCPPGAGVIAPGTPSQNTQCQPCPDGFFSNETSSKAPCRKHTNCSVFGLLLTQKGNATHDNICSGNSESTQKEPKSSDKTHTCPPCPAPEAAGAPSVFLFPPKPKDTLMISRTPEVTCVVVDVSHEDPEVKFNWYVDGVEVHNAKTKPREEQYNSTYRVVSVLTVLHQDWLNGKEYKCKVSNKALPAPIEKTISKAKGQPREPQVYTLPPSRDELTKNQVSLTCLVKGFYPSDIAVEWESNGQPENNYKTTPPVLDSDGSFFLYSKLTVDKSRWQQGNVFSCSVMHEALHNHYTQKSLSLSPGK

SEQ ID NO: 177 - DNA, 1215 bp, Artificial Sequence
  CDS (1)..(1215)
  Nucleotide sequence of Chimera A-Fc(Eg1S-LALAGANA)
gagacctttccccctaagtacctccattacgacgaagaaacaagccaccaactcctctgtgacaagtgccccccagggacatatttgaaacagcactgtaccgcaaagtggaaaacagtatgcgccccttgcccaccaagacactacactcagttttggaattacctggagagatgccgctattgtaacgttctgtgtggtgagcgtgaggaagaagctcgagcatgccatgctactcacaatcgtgcttgccggtgtagaaccggtttttttgcccatgcaggcttctgcctggaacatgcaagctgtccccctggcgctggcgttatcgcacccggaactcctagccagaatacacaatgtcagccttgccctgacggctttttctctaatgagacttcaagtaaagctccctgccgcaagcacaccaactgtagtgtgtttgggttgttgctgacccagaaggggaacgcaactcacgacaacatttgtagcgggaattcagaaagcacccaaaaggagcccaaatcttccgacaaaactcacacatgcccaccgtgcccagcacctgaagccgctggggccccgtcagtcttcctcttccccccaaaacccaaggacaccctcatgatctcccggacccctgaggtcacatgcgtggtggtggacgtgagccacgaagaccctgaggtcaagttcaactggtacgtggacggcgtggaggtgcataatgccaagacaaagccgcgggaggagcagtacaacagcacgtaccgtgtggtcagcgtcctcaccgtcctgcaccaggactggctgaatggcaaggagtacaagtgcaaggtctccaacaaagccctcccagcccccatcgagaaaaccatctccaaagccaaagggcagccccgagaaccacaggtgtacaccctgcccccatcccgggatgagctgaccaagaaccaggtcagcctgacctgcctggtcaaaggcttctatcccagcgacatcgccgtggagtgggagagcaatgggcagccggagaacaactacaagaccacgcctcccgtgctggactccgacggctccttcttcctctacagcaagctcaccgtggacaagagcaggtggcagcaggggaacgtcttctcatgctccgtgatgcatgaggctctgcacgcccactacacgcagaagagcctctccctgtctccgggtaaa

SEQ ID NO: 178 - protein, 405 aa, Artificial Sequence
  Amino acid sequence of Chimera A-Fc(Eg1S-LALAGANA)
ETFPPKYLHYDEETSHQLLCDKCPPGTYLKQHCTAKWKTVCAPCPPRHYTQFWNYLERCRYCNVLCGEREEEARACHATHNRACRCRTGFFAHAGFCLEHASCPPGAGVIAPGTPSQNTQCQPCPDGFFSNETSSKAPCRKHTNCSVFGLLLTQKGNATHDNICSGNSESTQKEPKSSDKTHTCPPCPAPEAAGAPSVFLFPPKPKDTLMISRTPEVTCVVVDVSHEDPEVKFNWYVDGVEVHNAKTKPREEQYNSTYRVVSVLTVLHQDWLNGKEYKCKVSNKALPAPIEKTISKAKGQPREPQVYTLPPSRDELTKNQVSLTCLVKGFYPSDIAVEWESNGQPENNYKTTPPVLDSDGSFFLYSKLTVDKSRWQQGNVFSCSVMHEALHAHYTQKSLSLSPGK

SEQ ID NO: 179 - DNA, 519 bp, Artificial Sequence
  CDS (1)..(519)
  Nucleotide sequence of Chimera A-E57R
gagacctttccccctaagtacctccattacgacgaagaaacaagccaccaactcctctgtgacaagtgccccccagggacatatttgaaacagcactgtaccgcaaagtggaaaacagtatgcgccccttgcccaccaagacactacactcagttttggaattacctgcggagatgccgctattgtaacgttctgtgtggtgagcgtgaggaagaagctcgagcatgccatgctactcacaatcgtgcttgccggtgtagaaccggtttttttgcccatgcaggcttctgcctggaacatgcaagctgtccccctggcgctggcgttatcgcacccggaactcctagccagaatacacaatgtcagccttgccctgacggctttttctctaatgagacttcaagtaaagctccctgccgcaagcacaccaactgtagtgtgtttgggttgttgctgacccagaaggggaacgcaactcacgacaacatttgtagcgggaattcagaaagcacccaaaag

SEQ ID NO: 180 - protein, 173 aa, Artificial Sequence
  Amino acid sequence of Chimera A-E57R
ETFPPKYLHYDEETSHQLLCDKCPPGTYLKQHCTAKWKTVCAPCPPRHYTQFWNYLRRCRYCNVLCGEREEEARACHATHNRACRCRTGFFAHAGFCLEHASCPPGAGVIAPGTPSQNTQCQPCPDGFFSNETSSKAPCRKHTNCSVFGLLLTQKGNATHDNICSGNSESTQK

SEQ ID NO: 181 - DNA, 519 bp, Artificial Sequence
  CDS (1)..(519)
  Nucleotide sequence of Chimera A-E57V
gagacctttccccctaagtacctccattacgacgaagaaacaagccaccaactcctctgtgacaagtgccccccagggacatatttgaaacagcactgtaccgcaaagtggaaaacagtatgcgccccttgcccaccaagacactacactcagttttggaattacctggtgagatgccgctattgtaacgttctgtgtggtgagcgtgaggaagaagctcgagcatgccatgctactcacaatcgtgcttgccggtgtagaaccggtttttttgcccatgcaggcttctgcctggaacatgcaagctgtccccctggcgctggcgttatcgcacccggaactcctagccagaatacacaatgtcagccttgccctgacggctttttctctaatgagacttcaagtaaagctccctgccgcaagcacaccaactgtagtgtgtttgggttgttgctgacccagaaggggaacgcaactcacgacaacatttgtagcgggaattcagaaagcacccaaaag

SEQ ID NO: 182 - protein, 173 aa, Artificial Sequence
  Amino acid sequence of Chimera A-E57V
ETFPPKYLHYDEETSHQLLCDKCPPGTYLKQHCTAKWKTVCAPCPPRHYTQFWNYLVRCRYCNVLCGEREEEARACHATHNRACRCRTGFFAHAGFCLEHASCPPGAGVIAPGTPSQNTQCQPCPDGFFSNETSSKAPCRKHTNCSVFGLLLTQKGNATHDNICSGNSESTQK

SEQ ID NO: 183 - DNA, 519 bp, Artificial Sequence
  CDS (1)..(519)
  Nucleotide sequence of Chimera A-E57K_R58D
gagacctttccccctaagtacctccattacgacgaagaaacaagccaccaactcctctgtgacaagtgccccccagggacatatttgaaacagcactgtaccgcaaagtggaaaacagtatgcgccccttgcccaccaagacactacactcagttttggaattacctgaaggactgccgctattgtaacgttctgtgtggtgagcgtgaggaagaagctcgagcatgccatgctactcacaatcgtgcttgccggtgtagaaccggtttttttgcccatgcaggcttctgcctggaacatgcaagctgtccccctggcgctggcgttatcgcacccggaactcctagccagaatacacaatgtcagccttgccctgacggctttttctctaatgagacttcaagtaaagctccctgccgcaagcacaccaactgtagtgtgtttgggttgttgctgacccagaaggggaacgcaactcacgacaacatttgtagcgggaattcagaaagcacccaaaag

SEQ ID NO: 184 - protein, 173 aa, Artificial Sequence
  Amino acid sequence of Chimera A-E57K_R58D
ETFPPKYLHYDEETSHQLLCDKCPPGTYLKQHCTAKWKTVCAPCPPRHYTQFWNYLKDCRYCNVLCGEREEEARACHATHNRACRCRTGFFAHAGFCLEHASCPPGAGVIAPGTPSQNTQCQPCPDGFFSNETSSKAPCRKHTNCSVFGLLLTQKGNATHDNICSGNSESTQK

SEQ ID NO: 185 - DNA, 519 bp, Artificial Sequence
  CDS (1)..(519)
  Nucleotide sequence of Chimera A-E57K_R58E
gagacctttccccctaagtacctccattacgacgaagaaacaagccaccaactcctctgtgacaagtgccccccagggacatatttgaaacagcactgtaccgcaaagtggaaaacagtatgcgccccttgcccaccaagacactacactcagttttggaattacctgaaggagtgccgctattgtaacgttctgtgtggtgagcgtgaggaagaagctcgagcatgccatgctactcacaatcgtgcttgccggtgtagaaccggtttttttgcccatgcaggcttctgcctggaacatgcaagctgtccccctggcgctggcgttatcgcacccggaactcctagccagaatacacaatgtcagccttgccctgacggctttttctctaatgagacttcaagtaaagctccctgccgcaagcacaccaactgtagtgtgtttgggttgttgctgacccagaaggggaacgcaactcacgacaacatttgtagcgggaattcagaaagcacccaaaag

SEQ ID NO: 186 - protein, 173 aa, Artificial Sequence
  Amino acid sequence of Chimera A-E57K_R58E
ETFPPKYLHYDEETSHQLLCDKCPPGTYLKQHCTAKWKTVCAPCPPRHYTQFWNYLKECRYCNVLCGEREEEARACHATHNRACRCRTGFFAHAGFCLEHASCPPGAGVIAPGTPSQNTQCQPCPDGFFSNETSSKAPCRKHTNCSVFGLLLTQKGNATHDNICSGNSESTQK

SEQ ID NO: 187 - DNA, 519 bp, Artificial Sequence
  CDS (1)..(519)
  Nucleotide sequence of Chimera A-E57R_R58D
gagacctttccccctaagtacctccattacgacgaagaaacaagccaccaactcctctgtgacaagtgccccccagggacatatttgaaacagcactgtaccgcaaagtggaaaacagtatgcgccccttgcccaccaagacactacactcagttttggaattacctgcgggactgccgctattgtaacgttctgtgtggtgagcgtgaggaagaagctcgagcatgccatgctactcacaatcgtgcttgccggtgtagaaccggtttttttgcccatgcaggcttctgcctggaacatgcaagctgtccccctggcgctggcgttatcgcacccggaactcctagccagaatacacaatgtcagccttgccctgacggctttttctctaatgagacttcaagtaaagctccctgccgcaagcacaccaactgtagtgtgtttgggttgttgctgacccagaaggggaacgcaactcacgacaacatttgtagcgggaattcagaaagcacccaaaag

SEQ ID NO: 188 - protein, 173 aa, Artificial Sequence
  Amino acid sequence of Chimera A-E57R_R58D
ETFPPKYLHYDEETSHQLLCDKCPPGTYLKQHCTAKWKTVCAPCPPRHYTQFWNYLRDCRYCNVLCGEREEEARACHATHNRACRCRTGFFAHAGFCLEHASCPPGAGVIAPGTPSQNTQCQPCPDGFFSNETSSKAPCRKHTNCSVFGLLLTQKGNATHDNICSGNSESTQK

SEQ ID NO: 189 - DNA, 1206 bp, Artificial Sequence
  CDS (1)..(1206)
  Nucleotide sequence of Chimera A-E57R-Fc(g4PEK)
gagacctttccccctaagtacctccattacgacgaagaaacaagccaccaactcctctgtgacaagtgccccccagggacatatttgaaacagcactgtaccgcaaagtggaaaacagtatgcgccccttgcccaccaagacactacactcagttttggaattacctgcggagatgccgctattgtaacgttctgtgtggtgagcgtgaggaagaagctcgagcatgccatgctactcacaatcgtgcttgccggtgtagaaccggtttttttgcccatgcaggcttctgcctggaacatgcaagctgtccccctggcgctggcgttatcgcacccggaactcctagccagaatacacaatgtcagccttgccctgacggctttttctctaatgagacttcaagtaaagctccctgccgcaagcacaccaactgtagtgtgtttgggttgttgctgacccagaaggggaacgcaactcacgacaacatttgtagcgggaattcagaaagcacccaaaaggagtccaaatatggtcccccatgcccaccatgcccagcacctgagttcgaggggggaccatcagtcttcctgttccccccaaaacccaaggacactctcatgatctcccggacccctgaggtcacgtgcgtggtggtggacgtgagccaggaagaccccgaggtccagttcaactggtacgtggatggcgtggaggtgcataatgccaagacaaagccgcgggaggagcagttcaacagcacgtaccgtgtggtcagcgtcctcaccgtcctgcaccaggactggctgaacggcaaggagtacaagtgcaaggtctccaacaaaggcctcccgtcctccatcgagaaaaccatctccaaagccaaagggcagccccgagagccacaggtgtacaccctgcccccatcccaggaggagatgaccaagaaccaggtcagcctgacctgcctggtcaaaggcttctaccccagcgacatcgccgtggagtgggagagcaatgggcagccggagaacaactacaagaccacgcctcccgtgctggactccgacggctccttcttcctctacagcaagctaaccgtggacaagagcaggtggcaggaggggaatgtcttctcatgctccgtgatgcatgaggctctgcacaaccactacacacagaagagcctctccctgtctctgggtaaa

SEQ ID NO: 190 - protein, 402 aa, Artificial Sequence
  Amino acid sequence of Chimera A-E57R-Fc(g4PEK)
ETFPPKYLHYDEETSHQLLCDKCPPGTYLKQHCTAKWKTVCAPCPPRHYTQFWNYLRRCRYCNVLCGEREEEARACHATHNRACRCRTGFFAHAGFCLEHASCPPGAGVIAPGTPSQNTQCQPCPDGFFSNETSSKAPCRKHTNCSVFGLLLTQKGNATHDNICSGNSESTQKESKYGPPCPPCPAPEFEGGPSVFLFPPKPKDTLMISRTPEVTCVVVDVSQEDPEVQFNWYVDGVEVHNAKTKPREEQFNSTYRVVSVLTVLHQDWLNGKEYKCKVSNKGLPSSIEKTISKAKGQPREPQVYTLPPSQEEMTKNQVSLTCLVKGFYPSDIAVEWESNGQPENNYKTTPPVLDSDGSFFLYSKLTVDKSRWQEGNVFSCSVMHEALHNHYTQKSLSLSLGK

SEQ ID NO: 191 - DNA, 1206 bp, Artificial Sequence
  CDS (1)..(1206)
  Nucleotide sequence of Chimera A-E57V-Fc(g4PEK)
gagacctttccccctaagtacctccattacgacgaagaaacaagccaccaactcctctgtgacaagtgccccccagggacatatttgaaacagcactgtaccgcaaagtggaaaacagtatgcgccccttgcccaccaagacactacactcagttttggaattacctggtgagatgccgctattgtaacgttctgtgtggtgagcgtgaggaagaagctcgagcatgccatgctactcacaatcgtgcttgccggtgtagaaccggtttttttgcccatgcaggcttctgcctggaacatgcaagctgtccccctggcgctggcgttatcgcacccggaactcctagccagaatacacaatgtcagccttgccctgacggctttttctctaatgagacttcaagtaaagctccctgccgcaagcacaccaactgtagtgtgtttgggttgttgctgacccagaaggggaacgcaactcacgacaacatttgtagcgggaattcagaaagcacccaaaaggagtccaaatatggtcccccatgcccaccatgcccagcacctgagttcgaggggggaccatcagtcttcctgttccccccaaaacccaaggacactctcatgatctcccggacccctgaggtcacgtgcgtggtggtggacgtgagccaggaagaccccgaggtccagttcaactggtacgtggatggcgtggaggtgcataatgccaagacaaagccgcgggaggagcagttcaacagcacgtaccgtgtggtcagcgtcctcaccgtcctgcaccaggactggctgaacggcaaggagtacaagtgcaaggtctccaacaaaggcctcccgtcctccatcgagaaaaccatctccaaagccaaagggcagccccgagagccacaggtgtacaccctgcccccatcccaggaggagatgaccaagaaccaggtcagcctgacctgcctggtcaaaggcttctaccccagcgacatcgccgtggagtgggagagcaatgggcagccggagaacaactacaagaccacgcctcccgtgctggactccgacggctccttcttcctctacagcaagctaaccgtggacaagagcaggtggcaggaggggaatgtcttctcatgctccgtgatgcatgaggctctgcacaaccactacacacagaagagcctctccctgtctctgggtaaa

SEQ ID NO: 192 - protein, 402 aa, Artificial Sequence
  Amino acid sequence of Chimera A-E57V-Fc(g4PEK)
ETFPPKYLHYDEETSHQLLCDKCPPGTYLKQHCTAKWKTVCAPCPPRHYTQFWNYLVRCRYCNVLCGEREEEARACHATHNRACRCRTGFFAHAGFCLEHASCPPGAGVIAPGTPSQNTQCQPCPDGFFSNETSSKAPCRKHTNCSVFGLLLTQKGNATHDNICSGNSESTQKESKYGPPCPPCPAPEFEGGPSVFLFPPKPKDTLMISRTPEVTCVVVDVSQEDPEVQFNWYVDGVEVHNAKTKPREEQFNSTYRVVSVLTVLHQDWLNGKEYKCKVSNKGLPSSIEKTISKAKGQPREPQVYTLPPSQEEMTKNQVSLTCLVKGFYPSDIAVEWESNGQPENNYKTTPPVLDSDGSFFLYSKLTVDKSRWQEGNVFSCSVMHEALHNHYTQKSLSLSLGK

SEQ ID NO: 193 - DNA, 1206 bp, Artificial Sequence
  CDS (1)..(1206)
  Nucleotide sequence of Chimera A-E57K_R58D-Fc(g4PEK)
gagacctttccccctaagtacctccattacgacgaagaaacaagccaccaactcctctgtgacaagtgccccccagggacatatttgaaacagcactgtaccgcaaagtggaaaacagtatgcgccccttgcccaccaagacactacactcagttttggaattacctgaaggactgccgctattgtaacgttctgtgtggtgagcgtgaggaagaagctcgagcatgccatgctactcacaatcgtgcttgccggtgtagaaccggtttttttgcccatgcaggcttctgcctggaacatgcaagctgtccccctggcgctggcgttatcgcacccggaactcctagccagaatacacaatgtcagccttgccctgacggctttttctctaatgagacttcaagtaaagctccctgccgcaagcacaccaactgtagtgtgtttgggttgttgctgacccagaaggggaacgcaactcacgacaacatttgtagcgggaattcagaaagcacccaaaaggagtccaaatatggtcccccatgcccaccatgcccagcacctgagttcgaggggggaccatcagtcttcctgttccccccaaaacccaaggacactctcatgatctcccggacccctgaggtcacgtgcgtggtggtggacgtgagccaggaagaccccgaggtccagttcaactggtacgtggatggcgtggaggtgcataatgccaagacaaagccgcgggaggagcagttcaacagcacgtaccgtgtggtcagcgtcctcaccgtcctgcaccaggactggctgaacggcaaggagtacaagtgcaaggtctccaacaaaggcctcccgtcctccatcgagaaaaccatctccaaagccaaagggcagccccgagagccacaggtgtacaccctgcccccatcccaggaggagatgaccaagaaccaggtcagcctgacctgcctggtcaaaggcttctaccccagcgacatcgccgtggagtgggagagcaatgggcagccggagaacaactacaagaccacgcctcccgtgctggactccgacggctccttcttcctctacagcaagctaaccgtggacaagagcaggtggcaggaggggaatgtcttctcatgctccgtgatgcatgaggctctgcacaaccactacacacagaagagcctctccctgtctctgggtaaa

SEQ ID NO: 194 - protein, 402 aa, Artificial Sequence
  Amino acid sequence of Chimera A-E57K_R58D-Fc(g4PEK)
ETFPPKYLHYDEETSHQLLCDKCPPGTYLKQHCTAKWKTVCAPCPPRHYTQFWNYLKDCRYCNVLCGEREEEARACHATHNRACRCRTGFFAHAGFCLEHASCPPGAGVIAPGTPSQNTQCQPCPDGFFSNETSSKAPCRKHTNCSVFGLLLTQKGNATHDNICSGNSESTQKESKYGPPCPPCPAPEFEGGPSVFLFPPKPKDTLMISRTPEVTCVVVDVSQEDPEVQFNWYVDGVEVHNAKTKPREEQFNSTYRVVSVLTVLHQDWLNGKEYKCKVSNKGLPSSIEKTISKAKGQPREPQVYTLPPSQEEMTKNQVSLTCLVKGFYPSDIAVEWESNGQPENNYKTTPPVLDSDGSFFLYSKLTVDKSRWQEGNVFSCSVMHEALHNHYTQKSLSLSLGK

SEQ ID NO: 195 - DNA, 1206 bp, Artificial Sequence
  CDS (1)..(1206)
  Nucleotide sequence of Chimera A-E57K_R58E-Fc(g4PEK)
gagacctttccccctaagtacctccattacgacgaagaaacaagccaccaactcctctgtgacaagtgccccccagggacatatttgaaacagcactgtaccgcaaagtggaaaacagtatgcgccccttgcccaccaagacactacactcagttttggaattacctgaaggagtgccgctattgtaacgttctgtgtggtgagcgtgaggaagaagctcgagcatgccatgctactcacaatcgtgcttgccggtgtagaaccggtttttttgcccatgcaggcttctgcctggaacatgcaagctgtccccctggcgctggcgttatcgcacccggaactcctagccagaatacacaatgtcagccttgccctgacggctttttctctaatgagacttcaagtaaagctccctgccgcaagcacaccaactgtagtgtgtttgggttgttgctgacccagaaggggaacgcaactcacgacaacatttgtagcgggaattcagaaagcacccaaaaggagtccaaatatggtcccccatgcccaccatgcccagcacctgagttcgaggggggaccatcagtcttcctgttccccccaaaacccaaggacactctcatgatctcccggacccctgaggtcacgtgcgtggtggtggacgtgagccaggaagaccccgaggtccagttcaactggtacgtggatggcgtggaggtgcataatgccaagacaaagccgcgggaggagcagttcaacagcacgtaccgtgtggtcagcgtcctcaccgtcctgcaccaggactggctgaacggcaaggagtacaagtgcaaggtctccaacaaaggcctcccgtcctccatcgagaaaaccatctccaaagccaaagggcagccccgagagccacaggtgtacaccctgcccccatcccaggaggagatgaccaagaaccaggtcagcctgacctgcctggtcaaaggcttctaccccagcgacatcgccgtggagtgggagagcaatgggcagccggagaacaactacaagaccacgcctcccgtgctggactccgacggctccttcttcctctacagcaagctaaccgtggacaagagcaggtggcaggaggggaatgtcttctcatgctccgtgatgcatgaggctctgcacaaccactacacacagaagagcctctccctgtctctgggtaaa

SEQ ID NO: 196 - protein, 402 aa, Artificial Sequence
  Amino acid sequence of Chimera A-E57K_R58E-Fc(g4PEK)
ETFPPKYLHYDEETSHQLLCDKCPPGTYLKQHCTAKWKTVCAPCPPRHYTQFWNYLKECRYCNVLCGEREEEARACHATHNRACRCRTGFFAHAGFCLEHASCPPGAGVIAPGTPSQNTQCQPCPDGFFSNETSSKAPCRKHTNCSVFGLLLTQKGNATHDNICSGNSESTQKESKYGPPCPPCPAPEFEGGPSVFLFPPKPKDTLMISRTPEVTCVVVDVSQEDPEVQFNWYVDGVEVHNAKTKPREEQFNSTYRVVSVLTVLHQDWLNGKEYKCKVSNKGLPSSIEKTISKAKGQPREPQVYTLPPSQEEMTKNQVSLTCLVKGFYPSDIAVEWESNGQPENNYKTTPPVLDSDGSFFLYSKLTVDKSRWQEGNVFSCSVMHEALHNHYTQKSLSLSLGK

SEQ ID NO: 197 - DNA, 1206 bp, Artificial Sequence
  CDS (1)..(1206)
  Nucleotide sequence of Chimera A-E57R_R58D-Fc(g4PEK)
gagacctttccccctaagtacctccattacgacgaagaaacaagccaccaactcctctgtgacaagtgccccccagggacatatttgaaacagcactgtaccgcaaagtggaaaacagtatgcgccccttgcccaccaagacactacactcagttttggaattacctgcgggactgccgctattgtaacgttctgtgtggtgagcgtgaggaagaagctcgagcatgccatgctactcacaatcgtgcttgccggtgtagaaccggtttttttgcccatgcaggcttctgcctggaacatgcaagctgtccccctggcgctggcgttatcgcacccggaactcctagccagaatacacaatgtcagccttgccctgacggctttttctctaatgagacttcaagtaaagctccctgccgcaagcacaccaactgtagtgtgtttgggttgttgctgacccagaaggggaacgcaactcacgacaacatttgtagcgggaattcagaaagcacccaaaaggagtccaaatatggtcccccatgcccaccatgcccagcacctgagttcgaggggggaccatcagtcttcctgttccccccaaaacccaaggacactctcatgatctcccggacccctgaggtcacgtgcgtggtggtggacgtgagccaggaagaccccgaggtccagttcaactggtacgtggatggcgtggaggtgcataatgccaagacaaagccgcgggaggagcagttcaacagcacgtaccgtgtggtcagcgtcctcaccgtcctgcaccaggactggctgaacggcaaggagtacaagtgcaaggtctccaacaaaggcctcccgtcctccatcgagaaaaccatctccaaagccaaagggcagccccgagagccacaggtgtacaccctgcccccatcccaggaggagatgaccaagaaccaggtcagcctgacctgcctggtcaaaggcttctaccccagcgacatcgccgtggagtgggagagcaatgggcagccggagaacaactacaagaccacgcctcccgtgctggactccgacggctccttcttcctctacagcaagctaaccgtggacaagagcaggtggcaggaggggaatgtcttctcatgctccgtgatgcatgaggctctgcacaaccactacacacagaagagcctctccctgtctctgggtaaa

SEQ ID NO: 198 - protein, 402 aa, Artificial Sequence
  Amino acid sequence of Chimera A-E57R_R58D-Fc(g4PEK)
ETFPPKYLHYDEETSHQLLCDKCPPGTYLKQHCTAKWKTVCAPCPPRHYTQFWNYLRDCRYCNVLCGEREEEARACHATHNRACRCRTGFFAHAGFCLEHASCPPGAGVIAPGTPSQNTQCQPCPDGFFSNETSSKAPCRKHTNCSVFGLLLTQKGNATHDNICSGNSESTQKESKYGPPCPPCPAPEFEGGPSVFLFPPKPKDTLMISRTPEVTCVVVDVSQEDPEVQFNWYVDGVEVHNAKTKPREEQFNSTYRVVSVLTVLHQDWLNGKEYKCKVSNKGLPSSIEKTISKAKGQPREPQVYTLPPSQEEMTKNQVSLTCLVKGFYPSDIAVEWESNGQPENNYKTTPPVLDSDGSFFLYSKLTVDKSRWQEGNVFSCSVMHEALHNHYTQKSLSLSLGK

SEQ ID NO: 199 - DNA, 1215 bp, Artificial Sequence
  CDS (1)..(1215)
  Nucleotide sequence of Chimera A-E57K-Fc(Eg1S)
gagacctttccccctaagtacctccattacgacgaagaaacaagccaccaactcctctgtgacaagtgccccccagggacatatttgaaacagcactgtaccgcaaagtggaaaacagtatgcgccccttgcccaccaagacactacactcagttttggaattacctgaagagatgccgctattgtaacgttctgtgtggtgagcgtgaggaagaagctcgagcatgccatgctactcacaatcgtgcttgccggtgtagaaccggtttttttgcccatgcaggcttctgcctggaacatgcaagctgtccccctggcgctggcgttatcgcacccggaactcctagccagaatacacaatgtcagccttgccctgacggctttttctctaatgagacttcaagtaaagctccctgccgcaagcacaccaactgtagtgtgtttgggttgttgctgacccagaaggggaacgcaactcacgacaacatttgtagcgggaattcagaaagcacccaaaaggagcccaaatcttccgacaaaactcacacatgcccaccgtgcccagcacctgaactcctggggggaccgtcagtcttcctcttccccccaaaacccaaggacaccctcatgatctcccggacccctgaggtcacatgcgtggtggtggacgtgagccacgaagaccctgaggtcaagttcaactggtacgtggacggcgtggaggtgcataatgccaagacaaagccgcgggaggagcagtacaacagcacgtaccgtgtggtcagcgtcctcaccgtcctgcaccaggactggctgaatggcaaggagtacaagtgcaaggtctccaacaaagccctcccagcccccatcgagaaaaccatctccaaagccaaagggcagccccgagaaccacaggtgtacaccctgcccccatcccgggatgagctgaccaagaaccaggtcagcctgacctgcctggtcaaaggcttctatcccagcgacatcgccgtggagtgggagagcaatgggcagccggagaacaactacaagaccacgcctcccgtgctggactccgacggctccttcttcctctacagcaagctcaccgtggacaagagcaggtggcagcaggggaacgtcttctcatgctccgtgatgcatgaggctctgcacaaccactacacgcagaagagcctctccctgtctccgggtaaa

SEQ ID NO: 200 - protein, 405 aa, Artificial Sequence
  Amino acid sequence of Chimera A-E57K-Fc(Eg1S)
ETFPPKYLHYDEETSHQLLCDKCPPGTYLKQHCTAKWKTVCAPCPPRHYTQFWNYLKRCRYCNVLCGEREEEARACHATHNRACRCRTGFFAHAGFCLEHASCPPGAGVIAPGTPSQNTQCQPCPDGFFSNETSSKAPCRKHTNCSVFGLLLTQKGNATHDNICSGNSESTQKEPKSSDKTHTCPPCPAPELLGGPSVFLFPPKPKDTLMISRTPEVTCVVVDVSHEDPEVKFNWYVDGVEVHNAKTKPREEQYNSTYRVVSVLTVLHQDWLNGKEYKCKVSNKALPAPIEKTISKAKGQPREPQVYTLPPSRDELTKNQVSLTCLVKGFYPSDIAVEWESNGQPENNYKTTPPVLDSDGSFFLYSKLTVDKSRWQQGNVFSCSVMHEALHNHYTQKSLSLSPGK

SEQ ID NO: 201 - DNA, 1215 bp, Artificial Sequence
  CDS (1)..(1215)
  Nucleotide sequence of Chimera A-E57L-Fc(Eg1S)
gagacctttccccctaagtacctccattacgacgaagaaacaagccaccaactcctctgtgacaagtgccccccagggacatatttgaaacagcactgtaccgcaaagtggaaaacagtatgcgccccttgcccaccaagacactacactcagttttggaattacctgctgagatgccgctattgtaacgttctgtgtggtgagcgtgaggaagaagctcgagcatgccatgctactcacaatcgtgcttgccggtgtagaaccggtttttttgcccatgcaggcttctgcctggaacatgcaagctgtccccctggcgctggcgttatcgcacccggaactcctagccagaatacacaatgtcagccttgccctgacggctttttctctaatgagacttcaagtaaagctccctgccgcaagcacaccaactgtagtgtgtttgggttgttgctgacccagaaggggaacgcaactcacgacaacatttgtagcgggaattcagaaagcacccaaaaggagcccaaatcttccgacaaaactcacacatgcccaccgtgcccagcacctgaactcctggggggaccgtcagtcttcctcttccccccaaaacccaaggacaccctcatgatctcccggacccctgaggtcacatgcgtggtggtggacgtgagccacgaagaccctgaggtcaagttcaactggtacgtggacggcgtggaggtgcataatgccaagacaaagccgcgggaggagcagtacaacagcacgtaccgtgtggtcagcgtcctcaccgtcctgcaccaggactggctgaatggcaaggagtacaagtgcaaggtctccaacaaagccctcccagcccccatcgagaaaaccatctccaaagccaaagggcagccccgagaaccacaggtgtacaccctgcccccatcccgggatgagctgaccaagaaccaggtcagcctgacctgcctggtcaaaggcttctatcccagcgacatcgccgtggagtgggagagcaatgggcagccggagaacaactacaagaccacgcctcccgtgctggactccgacggctccttcttcctctacagcaagctcaccgtggacaagagcaggtggcagcaggggaacgtcttctcatgctccgtgatgcatgaggctctgcacaaccactacacgcagaagagcctctccctgtctccgggtaaa

SEQ ID NO: 202 - protein, 405 aa, Artificial Sequence
  Amino acid sequence of Chimera A-E57L-Fc(Eg1S)
ETFPPKYLHYDEETSHQLLCDKCPPGTYLKQHCTAKWKTVCAPCPPRHYTQFWNYLLRCRYCNVLCGEREEEARACHATHNRACRCRTGFFAHAGFCLEHASCPPGAGVIAPGTPSQNTQCQPCPDGFFSNETSSKAPCRKHTNCSVFGLLLTQKGNATHDNICSGNSESTQKEPKSSDKTHTCPPCPAPELLGGPSVFLFPPKPKDTLMISRTPEVTCVVVDVSHEDPEVKFNWYVDGVEVHNAKTKPREEQYNSTYRVVSVLTVLHQDWLNGKEYKCKVSNKALPAPIEKTISKAKGQPREPQVYTLPPSRDELTKNQVSLTCLVKGFYPSDIAVEWESNGQPENNYKTTPPVLDSDGSFFLYSKLTVDKSRWQQGNVFSCSVMHEALHNHYTQKSLSLSPGK

SEQ ID NO: 203 - DNA, 1215 bp, Artificial Sequence
  CDS (1)..(1215)
  Nucleotide sequence of Chimera A-E57R-Fc(Eg1S)
gagacctttccccctaagtacctccattacgacgaagaaacaagccaccaactcctctgtgacaagtgccccccagggacatatttgaaacagcactgtaccgcaaagtggaaaacagtatgcgccccttgcccaccaagacactacactcagttttggaattacctgcggagatgccgctattgtaacgttctgtgtggtgagcgtgaggaagaagctcgagcatgccatgctactcacaatcgtgcttgccggtgtagaaccggtttttttgcccatgcaggcttctgcctggaacatgcaagctgtccccctggcgctggcgttatcgcacccggaactcctagccagaatacacaatgtcagccttgccctgacggctttttctctaatgagacttcaagtaaagctccctgccgcaagcacaccaactgtagtgtgtttgggttgttgctgacccagaaggggaacgcaactcacgacaacatttgtagcgggaattcagaaagcacccaaaaggagcccaaatcttccgacaaaactcacacatgcccaccgtgcccagcacctgaactcctggggggaccgtcagtcttcctcttccccccaaaacccaaggacaccctcatgatctcccggacccctgaggtcacatgcgtggtggtggacgtgagccacgaagaccctgaggtcaagttcaactggtacgtggacggcgtggaggtgcataatgccaagacaaagccgcgggaggagcagtacaacagcacgtaccgtgtggtcagcgtcctcaccgtcctgcaccaggactggctgaatggcaaggagtacaagtgcaaggtctccaacaaagccctcccagcccccatcgagaaaaccatctccaaagccaaagggcagccccgagaaccacaggtgtacaccctgcccccatcccgggatgagctgaccaagaaccaggtcagcctgacctgcctggtcaaaggcttctatcccagcgacatcgccgtggagtgggagagcaatgggcagccggagaacaactacaagaccacgcctcccgtgctggactccgacggctccttcttcctctacagcaagctcaccgtggacaagagcaggtggcagcaggggaacgtcttctcatgctccgtgatgcatgaggctctgcacaaccactacacgcagaagagcctctccctgtctccgggtaaa

SEQ ID NO: 204 - protein, 405 aa, Artificial Sequence
  Amino acid sequence of Chimera A-E57R-Fc(Eg1S)
ETFPPKYLHYDEETSHQLLCDKCPPGTYLKQHCTAKWKTVCAPCPPRHYTQFWNYLRRCRYCNVLCGEREEEARACHATHNRACRCRTGFFAHAGFCLEHASCPPGAGVIAPGTPSQNTQCQPCPDGFFSNETSSKAPCRKHTNCSVFGLLLTQKGNATHDNICSGNSESTQKEPKSSDKTHTCPPCPAPELLGGPSVFLFPPKPKDTLMISRTPEVTCVVVDVSHEDPEVKFNWYVDGVEVHNAKTKPREEQYNSTYRVVSVLTVLHQDWLNGKEYKCKVSNKALPAPIEKTISKAKGQPREPQVYTLPPSRDELTKNQVSLTCLVKGFYPSDIAVEWESNGQPENNYKTTPPVLDSDGSFFLYSKLTVDKSRWQQGNVFSCSVMHEALHNHYTQKSLSLSPGK

SEQ ID NO: 205 - DNA, 1215 bp, Artificial Sequence
  CDS (1)..(1215)
  Nucleotide sequence of Chimera A-E57V-Fc(Eg1S)
gagacctttccccctaagtacctccattacgacgaagaaacaagccaccaactcctctgtgacaagtgccccccagggacatatttgaaacagcactgtaccgcaaagtggaaaacagtatgcgccccttgcccaccaagacactacactcagttttggaattacctggtgagatgccgctattgtaacgttctgtgtggtgagcgtgaggaagaagctcgagcatgccatgctactcacaatcgtgcttgccggtgtagaaccggtttttttgcccatgcaggcttctgcctggaacatgcaagctgtccccctggcgctggcgttatcgcacccggaactcctagccagaatacacaatgtcagccttgccctgacggctttttctctaatgagacttcaagtaaagctccctgccgcaagcacaccaactgtagtgtgtttgggttgttgctgacccagaaggggaacgcaactcacgacaacatttgtagcgggaattcagaaagcacccaaaaggagcccaaatcttccgacaaaactcacacatgcccaccgtgcccagcacctgaactcctggggggaccgtcagtcttcctcttccccccaaaacccaaggacaccctcatgatctcccggacccctgaggtcacatgcgtggtggtggacgtgagccacgaagaccctgaggtcaagttcaactggtacgtggacggcgtggaggtgcataatgccaagacaaagccgcgggaggagcagtacaacagcacgtaccgtgtggtcagcgtcctcaccgtcctgcaccaggactggctgaatggcaaggagtacaagtgcaaggtctccaacaaagccctcccagcccccatcgagaaaaccatctccaaagccaaagggcagccccgagaaccacaggtgtacaccctgcccccatcccgggatgagctgaccaagaaccaggtcagcctgacctgcctggtcaaaggcttctatcccagcgacatcgccgtggagtgggagagcaatgggcagccggagaacaactacaagaccacgcctcccgtgctggactccgacggctccttcttcctctacagcaagctcaccgtggacaagagcaggtggcagcaggggaacgtcttctcatgctccgtgatgcatgaggctctgcacaaccactacacgcagaagagcctctccctgtctccgggtaaa

SEQ ID NO: 206 - protein, 405 aa, Artificial Sequence
  Amino acid sequence of Chimera A-E57V-Fc(Eg1S)
ETFPPKYLHYDEETSHQLLCDKCPPGTYLKQHCTAKWKTVCAPCPPRHYTQFWNYLVRCRYCNVLCGEREEEARACHATHNRACRCRTGFFAHAGFCLEHASCPPGAGVIAPGTPSQNTQCQPCPDGFFSNETSSKAPCRKHTNCSVFGLLLTQKGNATHDNICSGNSESTQKEPKSSDKTHTCPPCPAPELLGGPSVFLFPPKPKDTLMISRTPEVTCVVVDVSHEDPEVKFNWYVDGVEVHNAKTKPREEQYNSTYRVVSVLTVLHQDWLNGKEYKCKVSNKALPAPIEKTISKAKGQPREPQVYTLPPSRDELTKNQVSLTCLVKGFYPSDIAVEWESNGQPENNYKTTPPVLDSDGSFFLYSKLTVDKSRWQQGNVFSCSVMHEALHNHYTQKSLSLSPGK

SEQ ID NO: 207 - DNA, 1215 bp, Artificial Sequence
  CDS (1)..(1215)
  Nucleotide sequence of Chimera A-E57K_R58D-Fc(Eg1S)
gagacctttccccctaagtacctccattacgacgaagaaacaagccaccaactcctctgtgacaagtgccccccagggacatatttgaaacagcactgtaccgcaaagtggaaaacagtatgcgccccttgcccaccaagacactacactcagttttggaattacctgaaggactgccgctattgtaacgttctgtgtggtgagcgtgaggaagaagctcgagcatgccatgctactcacaatcgtgcttgccggtgtagaaccggtttttttgcccatgcaggcttctgcctggaacatgcaagctgtccccctggcgctggcgttatcgcacccggaactcctagccagaatacacaatgtcagccttgccctgacggctttttctctaatgagacttcaagtaaagctccctgccgcaagcacaccaactgtagtgtgtttgggttgttgctgacccagaaggggaacgcaactcacgacaacatttgtagcgggaattcagaaagcacccaaaaggagcccaaatcttccgacaaaactcacacatgcccaccgtgcccagcacctgaactcctggggggaccgtcagtcttcctcttccccccaaaacccaaggacaccctcatgatctcccggacccctgaggtcacatgcgtggtggtggacgtgagccacgaagaccctgaggtcaagttcaactggtacgtggacggcgtggaggtgcataatgccaagacaaagccgcgggaggagcagtacaacagcacgtaccgtgtggtcagcgtcctcaccgtcctgcaccaggactggctgaatggcaaggagtacaagtgcaaggtctccaacaaagccctcccagcccccatcgagaaaaccatctccaaagccaaagggcagccccgagaaccacaggtgtacaccctgcccccatcccgggatgagctgaccaagaaccaggtcagcctgacctgcctggtcaaaggcttctatcccagcgacatcgccgtggagtgggagagcaatgggcagccggagaacaactacaagaccacgcctcccgtgctggactccgacggctccttcttcctctacagcaagctcaccgtggacaagagcaggtggcagcaggggaacgtcttctcatgctccgtgatgcatgaggctctgcacaaccactacacgcagaagagcctctccctgtctccgggtaaa

SEQ ID NO: 208 - protein, 405 aa, Artificial Sequence
  Amino acid sequence of Chimera A-E57K_R58D-Fc(Eg1S)
ETFPPKYLHYDEETSHQLLCDKCPPGTYLKQHCTAKWKTVCAPCPPRHYTQFWNYLKDCRYCNVLCGEREEEARACHATHNRACRCRTGFFAHAGFCLEHASCPPGAGVIAPGTPSQNTQCQPCPDGFFSNETSSKAPCRKHTNCSVFGLLLTQKGNATHDNICSGNSESTQKEPKSSDKTHTCPPCPAPELLGGPSVFLFPPKPKDTLMISRTPEVTCVVVDVSHEDPEVKFNWYVDGVEVHNAKTKPREEQYNSTYRVVSVLTVLHQDWLNGKEYKCKVSNKALPAPIEKTISKAKGQPREPQVYTLPPSRDELTKNQVSLTCLVKGFYPSDIAVEWESNGQPENNYKTTPPVLDSDGSFFLYSKLTVDKSRWQQGNVFSCSVMHEALHNHYTQKSLSLSPGK

SEQ ID NO: 209 - DNA, 1215 bp, Artificial Sequence
  CDS (1)..(1215)
  Nucleotide sequence of Chimera A-E57K_R58E-Fc(Eg1S)
gagacctttccccctaagtacctccattacgacgaagaaacaagccaccaactcctctgtgacaagtgccccccagggacatatttgaaacagcactgtaccgcaaagtggaaaacagtatgcgccccttgcccaccaagacactacactcagttttggaattacctgaaggagtgccgctattgtaacgttctgtgtggtgagcgtgaggaagaagctcgagcatgccatgctactcacaatcgtgcttgccggtgtagaaccggtttttttgcccatgcaggcttctgcctggaacatgcaagctgtccccctggcgctggcgttatcgcacccggaactcctagccagaatacacaatgtcagccttgccctgacggctttttctctaatgagacttcaagtaaagctccctgccgcaagcacaccaactgtagtgtgtttgggttgttgctgacccagaaggggaacgcaactcacgacaacatttgtagcgggaattcagaaagcacccaaaaggagcccaaatcttccgacaaaactcacacatgcccaccgtgcccagcacctgaactcctggggggaccgtcagtcttcctcttccccccaaaacccaaggacaccctcatgatctcccggacccctgaggtcacatgcgtggtggtggacgtgagccacgaagaccctgaggtcaagttcaactggtacgtggacggcgtggaggtgcataatgccaagacaaagccgcgggaggagcagtacaacagcacgtaccgtgtggtcagcgtcctcaccgtcctgcaccaggactggctgaatggcaaggagtacaagtgcaaggtctccaacaaagccctcccagcccccatcgagaaaaccatctccaaagccaaagggcagccccgagaaccacaggtgtacaccctgcccccatcccgggatgagctgaccaagaaccaggtcagcctgacctgcctggtcaaaggcttctatcccagcgacatcgccgtggagtgggagagcaatgggcagccggagaacaactacaagaccacgcctcccgtgctggactccgacggctccttcttcctctacagcaagctcaccgtggacaagagcaggtggcagcaggggaacgtcttctcatgctccgtgatgcatgaggctctgcacaaccactacacgcagaagagcctctccctgtctccgggtaaa

SEQ ID NO: 210 - protein, 405 aa, Artificial Sequence
  Amino acid sequence of Chimera A-E57K_R58E-Fc(Eg1S)
ETFPPKYLHYDEETSHQLLCDKCPPGTYLKQHCTAKWKTVCAPCPPRHYTQFWNYLKECRYCNVLCGEREEEARACHATHNRACRCRTGFFAHAGFCLEHASCPPGAGVIAPGTPSQNTQCQPCPDGFFSNETSSKAPCRKHTNCSVFGLLLTQKGNATHDNICSGNSESTQKEPKSSDKTHTCPPCPAPELLGGPSVFLFPPKPKDTLMISRTPEVTCVVVDVSHEDPEVKFNWYVDGVEVHNAKTKPREEQYNSTYRVVSVLTVLHQDWLNGKEYKCKVSNKALPAPIEKTISKAKGQPREPQVYTLPPSRDELTKNQVSLTCLVKGFYPSDIAVEWESNGQPENNYKTTPPVLDSDGSFFLYSKLTVDKSRWQQGNVFSCSVMHEALHNHYTQKSLSLSPGK

SEQ ID NO: 211 - DNA, 1215 bp, Artificial Sequence
  CDS (1)..(1215)
  Nucleotide sequence of Chimera A-E57R_R58D-Fc(Eg1S)
gagacctttccccctaagtacctccattacgacgaagaaacaagccaccaactcctctgtgacaagtgccccccagggacatatttgaaacagcactgtaccgcaaagtggaaaacagtatgcgccccttgcccaccaagacactacactcagttttggaattacctgcgggactgccgctattgtaacgttctgtgtggtgagcgtgaggaagaagctcgagcatgccatgctactcacaatcgtgcttgccggtgtagaaccggtttttttgcccatgcaggcttctgcctggaacatgcaagctgtccccctggcgctggcgttatcgcacccggaactcctagccagaatacacaatgtcagccttgccctgacggctttttctctaatgagacttcaagtaaagctccctgccgcaagcacaccaactgtagtgtgtttgggttgttgctgacccagaaggggaacgcaactcacgacaacatttgtagcgggaattcagaaagcacccaaaaggagcccaaatcttccgacaaaactcacacatgcccaccgtgcccagcacctgaactcctggggggaccgtcagtcttcctcttccccccaaaacccaaggacaccctcatgatctcccggacccctgaggtcacatgcgtggtggtggacgtgagccacgaagaccctgaggtcaagttcaactggtacgtggacggcgtggaggtgcataatgccaagacaaagccgcgggaggagcagtacaacagcacgtaccgtgtggtcagcgtcctcaccgtcctgcaccaggactggctgaatggcaaggagtacaagtgcaaggtctccaacaaagccctcccagcccccatcgagaaaaccatctccaaagccaaagggcagccccgagaaccacaggtgtacaccctgcccccatcccgggatgagctgaccaagaaccaggtcagcctgacctgcctggtcaaaggcttctatcccagcgacatcgccgtggagtgggagagcaatgggcagccggagaacaactacaagaccacgcctcccgtgctggactccgacggctccttcttcctctacagcaagctcaccgtggacaagagcaggtggcagcaggggaacgtcttctcatgctccgtgatgcatgaggctctgcacaaccactacacgcagaagagcctctccctgtctccgggtaaa

SEQ ID NO: 212 - protein, 405 aa, Artificial Sequence
  Amino acid sequence of Chimera A-E57R_R58D-Fc(Eg1S)
ETFPPKYLHYDEETSHQLLCDKCPPGTYLKQHCTAKWKTVCAPCPPRHYTQFWNYLRDCRYCNVLCGEREEEARACHATHNRACRCRTGFFAHAGFCLEHASCPPGAGVIAPGTPSQNTQCQPCPDGFFSNETSSKAPCRKHTNCSVFGLLLTQKGNATHDNICSGNSESTQKEPKSSDKTHTCPPCPAPELLGGPSVFLFPPKPKDTLMISRTPEVTCVVVDVSHEDPEVKFNWYVDGVEVHNAKTKPREEQYNSTYRVVSVLTVLHQDWLNGKEYKCKVSNKALPAPIEKTISKAKGQPREPQVYTLPPSRDELTKNQVSLTCLVKGFYPSDIAVEWESNGQPENNYKTTPPVLDSDGSFFLYSKLTVDKSRWQQGNVFSCSVMHEALHNHYTQKSLSLSPGK

SEQ ID NO: 213 - DNA, 1215 bp, Artificial Sequence
  CDS (1)..(1215)
  Nucleotide sequence of Chimera A-E57K-Fc(Eg1S YTE)
gagacctttccccctaagtacctccattacgacgaagaaacaagccaccaactcctctgtgacaagtgccccccagggacatatttgaaacagcactgtaccgcaaagtggaaaacagtatgcgccccttgcccaccaagacactacactcagttttggaattacctgaagagatgccgctattgtaacgttctgtgtggtgagcgtgaggaagaagctcgagcatgccatgctactcacaatcgtgcttgccggtgtagaaccggtttttttgcccatgcaggcttctgcctggaacatgcaagctgtccccctggcgctggcgttatcgcacccggaactcctagccagaatacacaatgtcagccttgccctgacggctttttctctaatgagacttcaagtaaagctccctgccgcaagcacaccaactgtagtgtgtttgggttgttgctgacccagaaggggaacgcaactcacgacaacatttgtagcgggaattcagaaagcacccaaaaggagcccaaatcttccgacaaaactcacacatgcccaccgtgcccagcacctgaactcctggggggaccgtcagtcttcctcttccccccaaaacccaaggacaccctctatatcactcgggagcctgaggtcacatgcgtggtggtggacgtgagccacgaagaccctgaggtcaagttcaactggtacgtggacggcgtggaggtgcataatgccaagacaaagccgcgggaggagcagtacaacagcacgtaccgtgtggtcagcgtcctcaccgtcctgcaccaggactggctgaatggcaaggagtacaagtgcaaggtctccaacaaagccctcccagcccccatcgagaaaaccatctccaaagccaaagggcagccccgagaaccacaggtgtacaccctgcccccatcccgggatgagctgaccaagaaccaggtcagcctgacctgcctggtcaaaggcttctatcccagcgacatcgccgtggagtgggagagcaatgggcagccggagaacaactacaagaccacgcctcccgtgctggactccgacggctccttcttcctctacagcaagctcaccgtggacaagagcaggtggcagcaggggaacgtcttctcatgctccgtgatgcatgaggctctgcacaaccactacacgcagaagagcctctccctgtctccgggtaaa

SEQ ID NO: 214 - protein, 405 aa, Artificial Sequence
  Amino acid sequence of Chimera A-E57K-Fc(Eg1S YTE)
ETFPPKYLHYDEETSHQLLCDKCPPGTYLKQHCTAKWKTVCAPCPPRHYTQFWNYLKRCRYCNVLCGEREEEARACHATHNRACRCRTGFFAHAGFCLEHASCPPGAGVIAPGTPSQNTQCQPCPDGFFSNETSSKAPCRKHTNCSVFGLLLTQKGNATHDNICSGNSESTQKEPKSSDKTHTCPPCPAPELLGGPSVFLFPPKPKDTLYITREPEVTCVVVDVSHEDPEVKFNWYVDGVEVHNAKTKPREEQYNSTYRVVSVLTVLHQDWLNGKEYKCKVSNKALPAPIEKTISKAKGQPREPQVYTLPPSRDELTKNQVSLTCLVKGFYPSDIAVEWESNGQPENNYKTTPPVLDSDGSFFLYSKLTVDKSRWQQGNVFSCSVMHEALHNHYTQKSLSLSPGK

SEQ ID NO: 215 - DNA, 1215 bp, Artificial Sequence
  CDS (1)..(1215)
  Nucleotide sequence of Chimera A-E57L-Fc(Eg1S YTE)
gagacctttccccctaagtacctccattacgacgaagaaacaagccaccaactcctctgtgacaagtgccccccagggacatatttgaaacagcactgtaccgcaaagtggaaaacagtatgcgccccttgcccaccaagacactacactcagttttggaattacctgctgagatgccgctattgtaacgttctgtgtggtgagcgtgaggaagaagctcgagcatgccatgctactcacaatcgtgcttgccggtgtagaaccggtttttttgcccatgcaggcttctgcctggaacatgcaagctgtccccctggcgctggcgttatcgcacccggaactcctagccagaatacacaatgtcagccttgccctgacggctttttctctaatgagacttcaagtaaagctccctgccgcaagcacaccaactgtagtgtgtttgggttgttgctgacccagaaggggaacgcaactcacgacaacatttgtagcgggaattcagaaagcacccaaaaggagcccaaatcttccgacaaaactcacacatgcccaccgtgcccagcacctgaactcctggggggaccgtcagtcttcctcttccccccaaaacccaaggacaccctctatatcactcgggagcctgaggtcacatgcgtggtggtggacgtgagccacgaagaccctgaggtcaagttcaactggtacgtggacggcgtggaggtgcataatgccaagacaaagccgcgggaggagcagtacaacagcacgtaccgtgtggtcagcgtcctcaccgtcctgcaccaggactggctgaatggcaaggagtacaagtgcaaggtctccaacaaagccctcccagcccccatcgagaaaaccatctccaaagccaaagggcagccccgagaaccacaggtgtacaccctgcccccatcccgggatgagctgaccaagaaccaggtcagcctgacctgcctggtcaaaggcttctatcccagcgacatcgccgtggagtgggagagcaatgggcagccggagaacaactacaagaccacgcctcccgtgctggactccgacggctccttcttcctctacagcaagctcaccgtggacaagagcaggtggcagcaggggaacgtcttctcatgctccgtgatgcatgaggctctgcacaaccactacacgcagaagagcctctccctgtctccgggtaaa

SEQ ID NO: 216 - protein, 405 aa, Artificial Sequence
  Amino acid sequence of Chimera A-E57L-Fc(Eg1S YTE)
ETFPPKYLHYDEETSHQLLCDKCPPGTYLKQHCTAKWKTVCAPCPPRHYTQFWNYLLRCRYCNVLCGEREEEARACHATHNRACRCRTGFFAHAGFCLEHASCPPGAGVIAPGTPSQNTQCQPCPDGFFSNETSSKAPCRKHTNCSVFGLLLTQKGNATHDNICSGNSESTQKEPKSSDKTHTCPPCPAPELLGGPSVFLFPPKPKDTLYITREPEVTCVVVDVSHEDPEVKFNWYVDGVEVHNAKTKPREEQYNSTYRVVSVLTVLHQDWLNGKEYKCKVSNKALPAPIEKTISKAKGQPREPQVYTLPPSRDELTKNQVSLTCLVKGFYPSDIAVEWESNGQPENNYKTTPPVLDSDGSFFLYSKLTVDKSRWQQGNVFSCSVMHEALHNHYTQKSLSLSPGK

SEQ ID NO: 217 - DNA, 1215 bp, Artificial Sequence
  CDS (1)..(1215)
  Nucleotide sequence of Chimera A-E57R-Fc(Eg1S YTE)
gagacctttccccctaagtacctccattacgacgaagaaacaagccaccaactcctctgtgacaagtgccccccagggacatatttgaaacagcactgtaccgcaaagtggaaaacagtatgcgccccttgcccaccaagacactacactcagttttggaattacctgcggagatgccgctattgtaacgttctgtgtggtgagcgtgaggaagaagctcgagcatgccatgctactcacaatcgtgcttgccggtgtagaaccggtttttttgcccatgcaggcttctgcctggaacatgcaagctgtccccctggcgctggcgttatcgcacccggaactcctagccagaatacacaatgtcagccttgccctgacggctttttctctaatgagacttcaagtaaagctccctgccgcaagcacaccaactgtagtgtgtttgggttgttgctgacccagaaggggaacgcaactcacgacaacatttgtagcgggaattcagaaagcacccaaaaggagcccaaatcttccgacaaaactcacacatgcccaccgtgcccagcacctgaactcctggggggaccgtcagtcttcctcttccccccaaaacccaaggacaccctctatatcactcgggagcctgaggtcacatgcgtggtggtggacgtgagccacgaagaccctgaggtcaagttcaactggtacgtggacggcgtggaggtgcataatgccaagacaaagccgcgggaggagcagtacaacagcacgtaccgtgtggtcagcgtcctcaccgtcctgcaccaggactggctgaatggcaaggagtacaagtgcaaggtctccaacaaagccctcccagcccccatcgagaaaaccatctccaaagccaaagggcagccccgagaaccacaggtgtacaccctgcccccatcccgggatgagctgaccaagaaccaggtcagcctgacctgcctggtcaaaggcttctatcccagcgacatcgccgtggagtgggagagcaatgggcagccggagaacaactacaagaccacgcctcccgtgctggactccgacggctccttcttcctctacagcaagctcaccgtggacaagagcaggtggcagcaggggaacgtcttctcatgctccgtgatgcatgaggctctgcacaaccactacacgcagaagagcctctccctgtctccgggtaaa

SEQ ID NO: 218 - protein, 405 aa, Artificial Sequence
  Amino acid sequence of Chimera A-E57R-Fc(Eg1S YTE)
ETFPPKYLHYDEETSHQLLCDKCPPGTYLKQHCTAKWKTVCAPCPPRHYTQFWNYLRRCRYCNVLCGEREEEARACHATHNRACRCRTGFFAHAGFCLEHASCPPGAGVIAPGTPSQNTQCQPCPDGFFSNETSSKAPCRKHTNCSVFGLLLTQKGNATHDNICSGNSESTQKEPKSSDKTHTCPPCPAPELLGGPSVFLFPPKPKDTLYITREPEVTCVVVDVSHEDPEVKFNWYVDGVEVHNAKTKPREEQYNSTYRVVSVLTVLHQDWLNGKEYKCKVSNKALPAPIEKTISKAKGQPREPQVYTLPPSRDELTKNQVSLTCLVKGFYPSDIAVEWESNGQPENNYKTTPPVLDSDGSFFLYSKLTVDKSRWQQGNVFSCSVMHEALHNHYTQKSLSLSPGK

SEQ ID NO: 219 - DNA, 1215 bp, Artificial Sequence
  CDS (1)..(1215)
  Nucleotide sequence of Chimera A-E57V-Fc(Eg1S YTE)
gagacctttccccctaagtacctccattacgacgaagaaacaagccaccaactcctctgtgacaagtgccccccagggacatatttgaaacagcactgtaccgcaaagtggaaaacagtatgcgccccttgcccaccaagacactacactcagttttggaattacctggtgagatgccgctattgtaacgttctgtgtggtgagcgtgaggaagaagctcgagcatgccatgctactcacaatcgtgcttgccggtgtagaaccggtttttttgcccatgcaggcttctgcctggaacatgcaagctgtccccctggcgctggcgttatcgcacccggaactcctagccagaatacacaatgtcagccttgccctgacggctttttctctaatgagacttcaagtaaagctccctgccgcaagcacaccaactgtagtgtgtttgggttgttgctgacccagaaggggaacgcaactcacgacaacatttgtagcgggaattcagaaagcacccaaaaggagcccaaatcttccgacaaaactcacacatgcccaccgtgcccagcacctgaactcctggggggaccgtcagtcttcctcttccccccaaaacccaaggacaccctctatatcactcgggagcctgaggtcacatgcgtggtggtggacgtgagccacgaagaccctgaggtcaagttcaactggtacgtggacggcgtggaggtgcataatgccaagacaaagccgcgggaggagcagtacaacagcacgtaccgtgtggtcagcgtcctcaccgtcctgcaccaggactggctgaatggcaaggagtacaagtgcaaggtctccaacaaagccctcccagcccccatcgagaaaaccatctccaaagccaaagggcagccccgagaaccacaggtgtacaccctgcccccatcccgggatgagctgaccaagaaccaggtcagcctgacctgcctggtcaaaggcttctatcccagcgacatcgccgtggagtgggagagcaatgggcagccggagaacaactacaagaccacgcctcccgtgctggactccgacggctccttcttcctctacagcaagctcaccgtggacaagagcaggtggcagcaggggaacgtcttctcatgctccgtgatgcatgaggctctgcacaaccactacacgcagaagagcctctccctgtctccgggtaaa

SEQ ID NO: 220 - protein, 405 aa, Artificial Sequence
  Amino acid sequence of Chimera A-E57V-Fc(Eg1S YTE)
ETFPPKYLHYDEETSHQLLCDKCPPGTYLKQHCTAKWKTVCAPCPPRHYTQFWNYLVRCRYCNVLCGEREEEARACHATHNRACRCRTGFFAHAGFCLEHASCPPGAGVIAPGTPSQNTQCQPCPDGFFSNETSSKAPCRKHTNCSVFGLLLTQKGNATHDNICSGNSESTQKEPKSSDKTHTCPPCPAPELLGGPSVFLFPPKPKDTLYITREPEVTCVVVDVSHEDPEVKFNWYVDGVEVHNAKTKPREEQYNSTYRVVSVLTVLHQDWLNGKEYKCKVSNKALPAPIEKTISKAKGQPREPQVYTLPPSRDELTKNQVSLTCLVKGFYPSDIAVEWESNGQPENNYKTTPPVLDSDGSFFLYSKLTVDKSRWQQGNVFSCSVMHEALHNHYTQKSLSLSPGK

SEQ ID NO: 221 - DNA, 1215 bp, Artificial Sequence
  CDS (1)..(1215)
  Nucleotide sequence of Chimera A-E57K_R58D-Fc(Eg1S YTE)
gagacctttccccctaagtacctccattacgacgaagaaacaagccaccaactcctctgtgacaagtgccccccagggacatatttgaaacagcactgtaccgcaaagtggaaaacagtatgcgccccttgcccaccaagacactacactcagttttggaattacctgaaggactgccgctattgtaacgttctgtgtggtgagcgtgaggaagaagctcgagcatgccatgctactcacaatcgtgcttgccggtgtagaaccggtttttttgcccatgcaggcttctgcctggaacatgcaagctgtccccctggcgctggcgttatcgcacccggaactcctagccagaatacacaatgtcagccttgccctgacggctttttctctaatgagacttcaagtaaagctccctgccgcaagcacaccaactgtagtgtgtttgggttgttgctgacccagaaggggaacgcaactcacgacaacatttgtagcgggaattcagaaagcacccaaaaggagcccaaatcttccgacaaaactcacacatgcccaccgtgcccagcacctgaactcctggggggaccgtcagtcttcctcttccccccaaaacccaaggacaccctctatatcactcgggagcctgaggtcacatgcgtggtggtggacgtgagccacgaagaccctgaggtcaagttcaactggtacgtggacggcgtggaggtgcataatgccaagacaaagccgcgggaggagcagtacaacagcacgtaccgtgtggtcagcgtcctcaccgtcctgcaccaggactggctgaatggcaaggagtacaagtgcaaggtctccaacaaagccctcccagcccccatcgagaaaaccatctccaaagccaaagggcagccccgagaaccacaggtgtacaccctgcccccatcccgggatgagctgaccaagaaccaggtcagcctgacctgcctggtcaaaggcttctatcccagcgacatcgccgtggagtgggagagcaatgggcagccggagaacaactacaagaccacgcctcccgtgctggactccgacggctccttcttcctctacagcaagctcaccgtggacaagagcaggtggcagcaggggaacgtcttctcatgctccgtgatgcatgaggctctgcacaaccactacacgcagaagagcctctccctgtctccgggtaaa

SEQ ID NO: 222 - protein, 405 aa, Artificial Sequence
  Amino acid sequence of Chimera A-E57K_R58D-Fc(Eg1S YTE)
ETFPPKYLHYDEETSHQLLCDKCPPGTYLKQHCTAKWKTVCAPCPPRHYTQFWNYLKDCRYCNVLCGEREEEARACHATHNRACRCRTGFFAHAGFCLEHASCPPGAGVIAPGTPSQNTQCQPCPDGFFSNETSSKAPCRKHTNCSVFGLLLTQKGNATHDNICSGNSESTQKEPKSSDKTHTCPPCPAPELLGGPSVFLFPPKPKDTLYITREPEVTCVVVDVSHEDPEVKFNWYVDGVEVHNAKTKPREEQYNSTYRVVSVLTVLHQDWLNGKEYKCKVSNKALPAPIEKTISKAKGQPREPQVYTLPPSRDELTKNQVSLTCLVKGFYPSDIAVEWESNGQPENNYKTTPPVLDSDGSFFLYSKLTVDKSRWQQGNVFSCSVMHEALHNHYTQKSLSLSPGK

SEQ ID NO: 223 - DNA, 1215 bp, Artificial Sequence
  CDS (1)..(1215)
  Nucleotide sequence of Chimera A-E57K_R58E-Fc(Eg1S YTE)
gagacctttccccctaagtacctccattacgacgaagaaacaagccaccaactcctctgtgacaagtgccccccagggacatatttgaaacagcactgtaccgcaaagtggaaaacagtatgcgccccttgcccaccaagacactacactcagttttggaattacctgaaggagtgccgctattgtaacgttctgtgtggtgagcgtgaggaagaagctcgagcatgccatgctactcacaatcgtgcttgccggtgtagaaccggtttttttgcccatgcaggcttctgcctggaacatgcaagctgtccccctggcgctggcgttatcgcacccggaactcctagccagaatacacaatgtcagccttgccctgacggctttttctctaatgagacttcaagtaaagctccctgccgcaagcacaccaactgtagtgtgtttgggttgttgctgacccagaaggggaacgcaactcacgacaacatttgtagcgggaattcagaaagcacccaaaaggagcccaaatcttccgacaaaactcacacatgcccaccgtgcccagcacctgaactcctggggggaccgtcagtcttcctcttccccccaaaacccaaggacaccctctatatcactcgggagcctgaggtcacatgcgtggtggtggacgtgagccacgaagaccctgaggtcaagttcaactggtacgtggacggcgtggaggtgcataatgccaagacaaagccgcgggaggagcagtacaacagcacgtaccgtgtggtcagcgtcctcaccgtcctgcaccaggactggctgaatggcaaggagtacaagtgcaaggtctccaacaaagccctcccagcccccatcgagaaaaccatctccaaagccaaagggcagccccgagaaccacaggtgtacaccctgcccccatcccgggatgagctgaccaagaaccaggtcagcctgacctgcctggtcaaaggcttctatcccagcgacatcgccgtggagtgggagagcaatgggcagccggagaacaactacaagaccacgcctcccgtgctggactccgacggctccttcttcctctacagcaagctcaccgtggacaagagcaggtggcagcaggggaacgtcttctcatgctccgtgatgcatgaggctctgcacaaccactacacgcagaagagcctctccctgtctccgggtaaa

SEQ ID NO: 224 - protein, 405 aa, Artificial Sequence
  Amino acid sequence of Chimera A-E57K_R58E-Fc(Eg1S YTE)
ETFPPKYLHYDEETSHQLLCDKCPPGTYLKQHCTAKWKTVCAPCPPRHYTQFWNYLKECRYCNVLCGEREEEARACHATHNRACRCRTGFFAHAGFCLEHASCPPGAGVIAPGTPSQNTQCQPCPDGFFSNETSSKAPCRKHTNCSVFGLLLTQKGNATHDNICSGNSESTQKEPKSSDKTHTCPPCPAPELLGGPSVFLFPPKPKDTLYITREPEVTCVVVDVSHEDPEVKFNWYVDGVEVHNAKTKPREEQYNSTYRVVSVLTVLHQDWLNGKEYKCKVSNKALPAPIEKTISKAKGQPREPQVYTLPPSRDELTKNQVSLTCLVKGFYPSDIAVEWESNGQPENNYKTTPPVLDSDGSFFLYSKLTVDKSRWQQGNVFSCSVMHEALHNHYTQKSLSLSPGK

SEQ ID NO: 225 - DNA, 1215 bp, Artificial Sequence
  CDS (1)..(1215)
  Nucleotide sequence of Chimera A-E57R_R58D-Fc(Eg1S YTE)
gagacctttccccctaagtacctccattacgacgaagaaacaagccaccaactcctctgtgacaagtgccccccagggacatatttgaaacagcactgtaccgcaaagtggaaaacagtatgcgccccttgcccaccaagacactacactcagttttggaattacctgcgggactgccgctattgtaacgttctgtgtggtgagcgtgaggaagaagctcgagcatgccatgctactcacaatcgtgcttgccggtgtagaaccggtttttttgcccatgcaggcttctgcctggaacatgcaagctgtccccctggcgctggcgttatcgcacccggaactcctagccagaatacacaatgtcagccttgccctgacggctttttctctaatgagacttcaagtaaagctccctgccgcaagcacaccaactgtagtgtgtttgggttgttgctgacccagaaggggaacgcaactcacgacaacatttgtagcgggaattcagaaagcacccaaaaggagcccaaatcttccgacaaaactcacacatgcccaccgtgcccagcacctgaactcctggggggaccgtcagtcttcctcttccccccaaaacccaaggacaccctctatatcactcgggagcctgaggtcacatgcgtggtggtggacgtgagccacgaagaccctgaggtcaagttcaactggtacgtggacggcgtggaggtgcataatgccaagacaaagccgcgggaggagcagtacaacagcacgtaccgtgtggtcagcgtcctcaccgtcctgcaccaggactggctgaatggcaaggagtacaagtgcaaggtctccaacaaagccctcccagcccccatcgagaaaaccatctccaaagccaaagggcagccccgagaaccacaggtgtacaccctgcccccatcccgggatgagctgaccaagaaccaggtcagcctgacctgcctggtcaaaggcttctatcccagcgacatcgccgtggagtgggagagcaatgggcagccggagaacaactacaagaccacgcctcccgtgctggactccgacggctccttcttcctctacagcaagctcaccgtggacaagagcaggtggcagcaggggaacgtcttctcatgctccgtgatgcatgaggctctgcacaaccactacacgcagaagagcctctccctgtctccgggtaaa

SEQ ID NO: 226 - protein, 405 aa, Artificial Sequence
  Amino acid sequence of Chimera A-E57R_R58D-Fc(Eg1S YTE)
ETFPPKYLHYDEETSHQLLCDKCPPGTYLKQHCTAKWKTVCAPCPPRHYTQFWNYLRDCRYCNVLCGEREEEARACHATHNRACRCRTGFFAHAGFCLEHASCPPGAGVIAPGTPSQNTQCQPCPDGFFSNETSSKAPCRKHTNCSVFGLLLTQKGNATHDNICSGNSESTQKEPKSSDKTHTCPPCPAPELLGGPSVFLFPPKPKDTLYITREPEVTCVVVDVSHEDPEVKFNWYVDGVEVHNAKTKPREEQYNSTYRVVSVLTVLHQDWLNGKEYKCKVSNKALPAPIEKTISKAKGQPREPQVYTLPPSRDELTKNQVSLTCLVKGFYPSDIAVEWESNGQPENNYKTTPPVLDSDGSFFLYSKLTVDKSRWQQGNVFSCSVMHEALHNHYTQKSLSLSPGK

SEQ ID NO: 227 - DNA, 1215 bp, Artificial Sequence
  CDS (1)..(1215)
  Nucleotide sequence of Chimera A-E57K-Fc(Eg1S N434A)
gagacctttccccctaagtacctccattacgacgaagaaacaagccaccaactcctctgtgacaagtgccccccagggacatatttgaaacagcactgtaccgcaaagtggaaaacagtatgcgccccttgcccaccaagacactacactcagttttggaattacctgaagagatgccgctattgtaacgttctgtgtggtgagcgtgaggaagaagctcgagcatgccatgctactcacaatcgtgcttgccggtgtagaaccggtttttttgcccatgcaggcttctgcctggaacatgcaagctgtccccctggcgctggcgttatcgcacccggaactcctagccagaatacacaatgtcagccttgccctgacggctttttctctaatgagacttcaagtaaagctccctgccgcaagcacaccaactgtagtgtgtttgggttgttgctgacccagaaggggaacgcaactcacgacaacatttgtagcgggaattcagaaagcacccaaaaggagcccaaatcttccgacaaaactcacacatgcccaccgtgcccagcacctgaactcctggggggaccgtcagtcttcctcttccccccaaaacccaaggacaccctcatgatctcccggacccctgaggtcacatgcgtggtggtggacgtgagccacgaagaccctgaggtcaagttcaactggtacgtggacggcgtggaggtgcataatgccaagacaaagccgcgggaggagcagtacaacagcacgtaccgtgtggtcagcgtcctcaccgtcctgcaccaggactggctgaatggcaaggagtacaagtgcaaggtctccaacaaagccctcccagcccccatcgagaaaaccatctccaaagccaaagggcagccccgagaaccacaggtgtacaccctgcccccatcccgggatgagctgaccaagaaccaggtcagcctgacctgcctggtcaaaggcttctatcccagcgacatcgccgtggagtgggagagcaatgggcagccggagaacaactacaagaccacgcctcccgtgctggactccgacggctccttcttcctctacagcaagctcaccgtggacaagagcaggtggcagcaggggaacgtcttctcatgctccgtgatgcatgaggctctgcacgcccactacacgcagaagagcctctccctgtctccgggtaaa

SEQ ID NO: 228 - protein, 405 aa, Artificial Sequence
  Amino acid sequence of Chimera A-E57K-Fc(Eg1S N434A)
ETFPPKYLHYDEETSHQLLCDKCPPGTYLKQHCTAKWKTVCAPCPPRHYTQFWNYLKRCRYCNVLCGEREEEARACHATHNRACRCRTGFFAHAGFCLEHASCPPGAGVIAPGTPSQNTQCQPCPDGFFSNETSSKAPCRKHTNCSVFGLLLTQKGNATHDNICSGNSESTQKEPKSSDKTHTCPPCPAPELLGGPSVFLFPPKPKDTLMISRTPEVTCVVVDVSHEDPEVKFNWYVDGVEVHNAKTKPREEQYNSTYRVVSVLTVLHQDWLNGKEYKCKVSNKALPAPIEKTISKAKGQPREPQVYTLPPSRDELTKNQVSLTCLVKGFYPSDIAVEWESNGQPENNYKTTPPVLDSDGSFFLYSKLTVDKSRWQQGNVFSCSVMHEALHAHYTQKSLSLSPGK

SEQ ID NO: 229 - DNA, 1215 bp, Artificial Sequence
  CDS (1)..(1215)
  Nucleotide sequence of Chimera A-E57L-Fc(Eg1S N434A)
gagacctttccccctaagtacctccattacgacgaagaaacaagccaccaactcctctgtgacaagtgccccccagggacatatttgaaacagcactgtaccgcaaagtggaaaacagtatgcgccccttgcccaccaagacactacactcagttttggaattacctgctgagatgccgctattgtaacgttctgtgtggtgagcgtgaggaagaagctcgagcatgccatgctactcacaatcgtgcttgccggtgtagaaccggtttttttgcccatgcaggcttctgcctggaacatgcaagctgtccccctggcgctggcgttatcgcacccggaactcctagccagaatacacaatgtcagccttgccctgacggctttttctctaatgagacttcaagtaaagctccctgccgcaagcacaccaactgtagtgtgtttgggttgttgctgacccagaaggggaacgcaactcacgacaacatttgtagcgggaattcagaaagcacccaaaaggagcccaaatcttccgacaaaactcacacatgcccaccgtgcccagcacctgaactcctggggggaccgtcagtcttcctcttccccccaaaacccaaggacaccctcatgatctcccggacccctgaggtcacatgcgtggtggtggacgtgagccacgaagaccctgaggtcaagttcaactggtacgtggacggcgtggaggtgcataatgccaagacaaagccgcgggaggagcagtacaacagcacgtaccgtgtggtcagcgtcctcaccgtcctgcaccaggactggctgaatggcaaggagtacaagtgcaaggtctccaacaaagccctcccagcccccatcgagaaaaccatctccaaagccaaagggcagccccgagaaccacaggtgtacaccctgcccccatcccgggatgagctgaccaagaaccaggtcagcctgacctgcctggtcaaaggcttctatcccagcgacatcgccgtggagtgggagagcaatgggcagccggagaacaactacaagaccacgcctcccgtgctggactccgacggctccttcttcctctacagcaagctcaccgtggacaagagcaggtggcagcaggggaacgtcttctcatgctccgtgatgcatgaggctctgcacgcccactacacgcagaagagcctctccctgtctccgggtaaa

SEQ ID NO: 230 - protein, 405 aa, Artificial Sequence
  Amino acid sequence of Chimera A-E57L-Fc(Eg1S N434A)
ETFPPKYLHYDEETSHQLLCDKCPPGTYLKQHCTAKWKTVCAPCPPRHYTQFWNYLLRCRYCNVLCGEREEEARACHATHNRACRCRTGFFAHAGFCLEHASCPPGAGVIAPGTPSQNTQCQPCPDGFFSNETSSKAPCRKHTNCSVFGLLLTQKGNATHDNICSGNSESTQKEPKSSDKTHTCPPCPAPELLGGPSVFLFPPKPKDTLMISRTPEVTCVVVDVSHEDPEVKFNWYVDGVEVHNAKTKPREEQYNSTYRVVSVLTVLHQDWLNGKEYKCKVSNKALPAPIEKTISKAKGQPREPQVYTLPPSRDELTKNQVSLTCLVKGFYPSDIAVEWESNGQPENNYKTTPPVLDSDGSFFLYSKLTVDKSRWQQGNVFSCSVMHEALHAHYTQKSLSLSPGK

SEQ ID NO: 231 - DNA, 1215 bp, Artificial Sequence
  CDS (1)..(1215)
  Nucleotide sequence of Chimera A-E57R-Fc(Eg1S N434A)
gagacctttccccctaagtacctccattacgacgaagaaacaagccaccaactcctctgtgacaagtgccccccagggacatatttgaaacagcactgtaccgcaaagtggaaaacagtatgcgccccttgcccaccaagacactacactcagttttggaattacctgcggagatgccgctattgtaacgttctgtgtggtgagcgtgaggaagaagctcgagcatgccatgctactcacaatcgtgcttgccggtgtagaaccggtttttttgcccatgcaggcttctgcctggaacatgcaagctgtccccctggcgctggcgttatcgcacccggaactcctagccagaatacacaatgtcagccttgccctgacggctttttctctaatgagacttcaagtaaagctccctgccgcaagcacaccaactgtagtgtgtttgggttgttgctgacccagaaggggaacgcaactcacgacaacatttgtagcgggaattcagaaagcacccaaaaggagcccaaatcttccgacaaaactcacacatgcccaccgtgcccagcacctgaactcctggggggaccgtcagtcttcctcttccccccaaaacccaaggacaccctcatgatctcccggacccctgaggtcacatgcgtggtggtggacgtgagccacgaagaccctgaggtcaagttcaactggtacgtggacggcgtggaggtgcataatgccaagacaaagccgcgggaggagcagtacaacagcacgtaccgtgtggtcagcgtcctcaccgtcctgcaccaggactggctgaatggcaaggagtacaagtgcaaggtctccaacaaagccctcccagcccccatcgagaaaaccatctccaaagccaaagggcagccccgagaaccacaggtgtacaccctgcccccatcccgggatgagctgaccaagaaccaggtcagcctgacctgcctggtcaaaggcttctatcccagcgacatcgccgtggagtgggagagcaatgggcagccggagaacaactacaagaccacgcctcccgtgctggactccgacggctccttcttcctctacagcaagctcaccgtggacaagagcaggtggcagcaggggaacgtcttctcatgctccgtgatgcatgaggctctgcacgcccactacacgcagaagagcctctccctgtctccgggtaaa

SEQ ID NO: 232 - protein, 405 aa, Artificial Sequence
  Amino acid sequence of Chimera A-E57R-Fc(Eg1S N434A)
ETFPPKYLHYDEETSHQLLCDKCPPGTYLKQHCTAKWKTVCAPCPPRHYTQFWNYLRRCRYCNVLCGEREEEARACHATHNRACRCRTGFFAHAGFCLEHASCPPGAGVIAPGTPSQNTQCQPCPDGFFSNETSSKAPCRKHTNCSVFGLLLTQKGNATHDNICSGNSESTQKEPKSSDKTHTCPPCPAPELLGGPSVFLFPPKPKDTLMISRTPEVTCVVVDVSHEDPEVKFNWYVDGVEVHNAKTKPREEQYNSTYRVVSVLTVLHQDWLNGKEYKCKVSNKALPAPIEKTISKAKGQPREPQVYTLPPSRDELTKNQVSLTCLVKGFYPSDIAVEWESNGQPENNYKTTPPVLDSDGSFFLYSKLTVDKSRWQQGNVFSCSVMHEALHAHYTQKSLSLSPGK

SEQ ID NO: 233 - DNA, 1215 bp, Artificial Sequence
  CDS (1)..(1215)
  Nucleotide sequence of Chimera A-E57V-Fc(Eg1S N434A)
gagacctttccccctaagtacctccattacgacgaagaaacaagccaccaactcctctgtgacaagtgccccccagggacatatttgaaacagcactgtaccgcaaagtggaaaacagtatgcgccccttgcccaccaagacactacactcagttttggaattacctggtgagatgccgctattgtaacgttctgtgtggtgagcgtgaggaagaagctcgagcatgccatgctactcacaatcgtgcttgccggtgtagaaccggtttttttgcccatgcaggcttctgcctggaacatgcaagctgtccccctggcgctggcgttatcgcacccggaactcctagccagaatacacaatgtcagccttgccctgacggctttttctctaatgagacttcaagtaaagctccctgccgcaagcacaccaactgtagtgtgtttgggttgttgctgacccagaaggggaacgcaactcacgacaacatttgtagcgggaattcagaaagcacccaaaaggagcccaaatcttccgacaaaactcacacatgcccaccgtgcccagcacctgaactcctggggggaccgtcagtcttcctcttccccccaaaacccaaggacaccctcatgatctcccggacccctgaggtcacatgcgtggtggtggacgtgagccacgaagaccctgaggtcaagttcaactggtacgtggacggcgtggaggtgcataatgccaagacaaagccgcgggaggagcagtacaacagcacgtaccgtgtggtcagcgtcctcaccgtcctgcaccaggactggctgaatggcaaggagtacaagtgcaaggtctccaacaaagccctcccagcccccatcgagaaaaccatctccaaagccaaagggcagccccgagaaccacaggtgtacaccctgcccccatcccgggatgagctgaccaagaaccaggtcagcctgacctgcctggtcaaaggcttctatcccagcgacatcgccgtggagtgggagagcaatgggcagccggagaacaactacaagaccacgcctcccgtgctggactccgacggctccttcttcctctacagcaagctcaccgtggacaagagcaggtggcagcaggggaacgtcttctcatgctccgtgatgcatgaggctctgcacgcccactacacgcagaagagcctctccctgtctccgggtaaa

SEQ ID NO: 234 - protein, 405 aa, Artificial Sequence
  Amino acid sequence of Chimera A-E57V-Fc(Eg1S N434A)
ETFPPKYLHYDEETSHQLLCDKCPPGTYLKQHCTAKWKTVCAPCPPRHYTQFWNYLVRCRYCNVLCGEREEEARACHATHNRACRCRTGFFAHAGFCLEHASCPPGAGVIAPGTPSQNTQCQPCPDGFFSNETSSKAPCRKHTNCSVFGLLLTQKGNATHDNICSGNSESTQKEPKSSDKTHTCPPCPAPELLGGPSVFLFPPKPKDTLMISRTPEVTCVVVDVSHEDPEVKFNWYVDGVEVHNAKTKPREEQYNSTYRVVSVLTVLHQDWLNGKEYKCKVSNKALPAPIEKTISKAKGQPREPQVYTLPPSRDELTKNQVSLTCLVKGFYPSDIAVEWESNGQPENNYKTTPPVLDSDGSFFLYSKLTVDKSRWQQGNVFSCSVMHEALHAHYTQKSLSLSPGK

SEQ ID NO: 235 - DNA, 1215 bp, Artificial Sequence
  CDS (1)..(1215)
  Nucleotide sequence of Chimera A-E57K_R58D-Fc(Eg1S N434A)
gagacctttccccctaagtacctccattacgacgaagaaacaagccaccaactcctctgtgacaagtgccccccagggacatatttgaaacagcactgtaccgcaaagtggaaaacagtatgcgccccttgcccaccaagacactacactcagttttggaattacctgaaggactgccgctattgtaacgttctgtgtggtgagcgtgaggaagaagctcgagcatgccatgctactcacaatcgtgcttgccggtgtagaaccggtttttttgcccatgcaggcttctgcctggaacatgcaagctgtccccctggcgctggcgttatcgcacccggaactcctagccagaatacacaatgtcagccttgccctgacggctttttctctaatgagacttcaagtaaagctccctgccgcaagcacaccaactgtagtgtgtttgggttgttgctgacccagaaggggaacgcaactcacgacaacatttgtagcgggaattcagaaagcacccaaaaggagcccaaatcttccgacaaaactcacacatgcccaccgtgcccagcacctgaactcctggggggaccgtcagtcttcctcttccccccaaaacccaaggacaccctcatgatctcccggacccctgaggtcacatgcgtggtggtggacgtgagccacgaagaccctgaggtcaagttcaactggtacgtggacggcgtggaggtgcataatgccaagacaaagccgcgggaggagcagtacaacagcacgtaccgtgtggtcagcgtcctcaccgtcctgcaccaggactggctgaatggcaaggagtacaagtgcaaggtctccaacaaagccctcccagcccccatcgagaaaaccatctccaaagccaaagggcagccccgagaaccacaggtgtacaccctgcccccatcccgggatgagctgaccaagaaccaggtcagcctgacctgcctggtcaaaggcttctatcccagcgacatcgccgtggagtgggagagcaatgggcagccggagaacaactacaagaccacgcctcccgtgctggactccgacggctccttcttcctctacagcaagctcaccgtggacaagagcaggtggcagcaggggaacgtcttctcatgctccgtgatgcatgaggctctgcacgcccactacacgcagaagagcctctccctgtctccgggtaaa

SEQ ID NO: 236 - protein, 405 aa, Artificial Sequence
  Amino acid sequence of Chimera A-E57K_R58D-Fc(Eg1S N434A)
ETFPPKYLHYDEETSHQLLCDKCPPGTYLKQHCTAKWKTVCAPCPPRHYTQFWNYLKDCRYCNVLCGEREEEARACHATHNRACRCRTGFFAHAGFCLEHASCPPGAGVIAPGTPSQNTQCQPCPDGFFSNETSSKAPCRKHTNCSVFGLLLTQKGNATHDNICSGNSESTQKEPKSSDKTHTCPPCPAPELLGGPSVFLFPPKPKDTLMISRTPEVTCVVVDVSHEDPEVKFNWYVDGVEVHNAKTKPREEQYNSTYRVVSVLTVLHQDWLNGKEYKCKVSNKALPAPIEKTISKAKGQPREPQVYTLPPSRDELTKNQVSLTCLVKGFYPSDIAVEWESNGQPENNYKTTPPVLDSDGSFFLYSKLTVDKSRWQQGNVFSCSVMHEALHAHYTQKSLSLSPGK

SEQ ID NO: 237 - DNA, 1215 bp, Artificial Sequence
  CDS (1)..(1215)
  Nucleotide sequence of Chimera A-E57K_R58E-Fc(Eg1S N434A)
gagacctttccccctaagtacctccattacgacgaagaaacaagccaccaactcctctgtgacaagtgccccccagggacatatttgaaacagcactgtaccgcaaagtggaaaacagtatgcgccccttgcccaccaagacactacactcagttttggaattacctgaaggagtgccgctattgtaacgttctgtgtggtgagcgtgaggaagaagctcgagcatgccatgctactcacaatcgtgcttgccggtgtagaaccggtttttttgcccatgcaggcttctgcctggaacatgcaagctgtccccctggcgctggcgttatcgcacccggaactcctagccagaatacacaatgtcagccttgccctgacggctttttctctaatgagacttcaagtaaagctccctgccgcaagcacaccaactgtagtgtgtttgggttgttgctgacccagaaggggaacgcaactcacgacaacatttgtagcgggaattcagaaagcacccaaaaggagcccaaatcttccgacaaaactcacacatgcccaccgtgcccagcacctgaactcctggggggaccgtcagtcttcctcttccccccaaaacccaaggacaccctcatgatctcccggacccctgaggtcacatgcgtggtggtggacgtgagccacgaagaccctgaggtcaagttcaactggtacgtggacggcgtggaggtgcataatgccaagacaaagccgcgggaggagcagtacaacagcacgtaccgtgtggtcagcgtcctcaccgtcctgcaccaggactggctgaatggcaaggagtacaagtgcaaggtctccaacaaagccctcccagcccccatcgagaaaaccatctccaaagccaaagggcagccccgagaaccacaggtgtacaccctgcccccatcccgggatgagctgaccaagaaccaggtcagcctgacctgcctggtcaaaggcttctatcccagcgacatcgccgtggagtgggagagcaatgggcagccggagaacaactacaagaccacgcctcccgtgctggactccgacggctccttcttcctctacagcaagctcaccgtggacaagagcaggtggcagcaggggaacgtcttctcatgctccgtgatgcatgaggctctgcacgcccactacacgcagaagagcctctccctgtctccgggtaaa

SEQ ID NO: 238 - protein, 405 aa, Artificial Sequence
  Amino acid sequence of Chimera A-E57K_R58E-Fc(Eg1S N434A)
ETFPPKYLHYDEETSHQLLCDKCPPGTYLKQHCTAKWKTVCAPCPPRHYTQFWNYLKECRYCNVLCGEREEEARACHATHNRACRCRTGFFAHAGFCLEHASCPPGAGVIAPGTPSQNTQCQPCPDGFFSNETSSKAPCRKHTNCSVFGLLLTQKGNATHDNICSGNSESTQKEPKSSDKTHTCPPCPAPELLGGPSVFLFPPKPKDTLMISRTPEVTCVVVDVSHEDPEVKFNWYVDGVEVHNAKTKPREEQYNSTYRVVSVLTVLHQDWLNGKEYKCKVSNKALPAPIEKTISKAKGQPREPQVYTLPPSRDELTKNQVSLTCLVKGFYPSDIAVEWESNGQPENNYKTTPPVLDSDGSFFLYSKLTVDKSRWQQGNVFSCSVMHEALHAHYTQKSLSLSPGK

SEQ ID NO: 239 - DNA, 1215 bp, Artificial Sequence
  CDS (1)..(1215)
  Nucleotide sequence of Chimera A-E57R_R58D-Fc(Eg1S N434A)
gagacctttccccctaagtacctccattacgacgaagaaacaagccaccaactcctctgtgacaagtgccccccagggacatatttgaaacagcactgtaccgcaaagtggaaaacagtatgcgccccttgcccaccaagacactacactcagttttggaattacctgcgggactgccgctattgtaacgttctgtgtggtgagcgtgaggaagaagctcgagcatgccatgctactcacaatcgtgcttgccggtgtagaaccggtttttttgcccatgcaggcttctgcctggaacatgcaagctgtccccctggcgctggcgttatcgcacccggaactcctagccagaatacacaatgtcagccttgccctgacggctttttctctaatgagacttcaagtaaagctccctgccgcaagcacaccaactgtagtgtgtttgggttgttgctgacccagaaggggaacgcaactcacgacaacatttgtagcgggaattcagaaagcacccaaaaggagcccaaatcttccgacaaaactcacacatgcccaccgtgcccagcacctgaactcctggggggaccgtcagtcttcctcttccccccaaaacccaaggacaccctcatgatctcccggacccctgaggtcacatgcgtggtggtggacgtgagccacgaagaccctgaggtcaagttcaactggtacgtggacggcgtggaggtgcataatgccaagacaaagccgcgggaggagcagtacaacagcacgtaccgtgtggtcagcgtcctcaccgtcctgcaccaggactggctgaatggcaaggagtacaagtgcaaggtctccaacaaagccctcccagcccccatcgagaaaaccatctccaaagccaaagggcagccccgagaaccacaggtgtacaccctgcccccatcccgggatgagctgaccaagaaccaggtcagcctgacctgcctggtcaaaggcttctatcccagcgacatcgccgtggagtgggagagcaatgggcagccggagaacaactacaagaccacgcctcccgtgctggactccgacggctccttcttcctctacagcaagctcaccgtggacaagagcaggtggcagcaggggaacgtcttctcatgctccgtgatgcatgaggctctgcacgcccactacacgcagaagagcctctccctgtctccgggtaaa

SEQ ID NO: 240 - protein, 405 aa, Artificial Sequence
  Amino acid sequence of Chimera A-E57R_R58D-Fc(Eg1S N434A)
ETFPPKYLHYDEETSHQLLCDKCPPGTYLKQHCTAKWKTVCAPCPPRHYTQFWNYLRDCRYCNVLCGEREEEARACHATHNRACRCRTGFFAHAGFCLEHASCPPGAGVIAPGTPSQNTQCQPCPDGFFSNETSSKAPCRKHTNCSVFGLLLTQKGNATHDNICSGNSESTQKEPKSSDKTHTCPPCPAPELLGGPSVFLFPPKPKDTLMISRTPEVTCVVVDVSHEDPEVKFNWYVDGVEVHNAKTKPREEQYNSTYRVVSVLTVLHQDWLNGKEYKCKVSNKALPAPIEKTISKAKGQPREPQVYTLPPSRDELTKNQVSLTCLVKGFYPSDIAVEWESNGQPENNYKTTPPVLDSDGSFFLYSKLTVDKSRWQQGNVFSCSVMHEALHAHYTQKSLSLSPGK

SEQ ID NO: 241 - DNA, 1215 bp, Artificial Sequence
  CDS (1)..(1215)
  Nucleotide sequence of Chimera A-E57K-Fc(Eg1S LALAGA)
gagacctttccccctaagtacctccattacgacgaagaaacaagccaccaactcctctgtgacaagtgccccccagggacatatttgaaacagcactgtaccgcaaagtggaaaacagtatgcgccccttgcccaccaagacactacactcagttttggaattacctgaagagatgccgctattgtaacgttctgtgtggtgagcgtgaggaagaagctcgagcatgccatgctactcacaatcgtgcttgccggtgtagaaccggtttttttgcccatgcaggcttctgcctggaacatgcaagctgtccccctggcgctggcgttatcgcacccggaactcctagccagaatacacaatgtcagccttgccctgacggctttttctctaatgagacttcaagtaaagctccctgccgcaagcacaccaactgtagtgtgtttgggttgttgctgacccagaaggggaacgcaactcacgacaacatttgtagcgggaattcagaaagcacccaaaaggagcccaaatcttccgacaaaactcacacatgcccaccgtgcccagcacctgaagccgctggggccccgtcagtcttcctcttccccccaaaacccaaggacaccctcatgatctcccggacccctgaggtcacatgcgtggtggtggacgtgagccacgaagaccctgaggtcaagttcaactggtacgtggacggcgtggaggtgcataatgccaagacaaagccgcgggaggagcagtacaacagcacgtaccgtgtggtcagcgtcctcaccgtcctgcaccaggactggctgaatggcaaggagtacaagtgcaaggtctccaacaaagccctcccagcccccatcgagaaaaccatctccaaagccaaagggcagccccgagaaccacaggtgtacaccctgcccccatcccgggatgagctgaccaagaaccaggtcagcctgacctgcctggtcaaaggcttctatcccagcgacatcgccgtggagtgggagagcaatgggcagccggagaacaactacaagaccacgcctcccgtgctggactccgacggctccttcttcctctacagcaagctcaccgtggacaagagcaggtggcagcaggggaacgtcttctcatgctccgtgatgcatgaggctctgcacaaccactacacgcagaagagcctctccctgtctccgggcaaa

SEQ ID NO: 242 - protein, 405 aa, Artificial Sequence
  Amino acid sequence of Chimera A-E57K-Fc(Eg1S LALAGA)
ETFPPKYLHYDEETSHQLLCDKCPPGTYLKQHCTAKWKTVCAPCPPRHYTQFWNYLKRCRYCNVLCGEREEEARACHATHNRACRCRTGFFAHAGFCLEHASCPPGAGVIAPGTPSQNTQCQPCPDGFFSNETSSKAPCRKHTNCSVFGLLLTQKGNATHDNICSGNSESTQKEPKSSDKTHTCPPCPAPEAAGAPSVFLFPPKPKDTLMISRTPEVTCVVVDVSHEDPEVKFNWYVDGVEVHNAKTKPREEQYNSTYRVVSVLTVLHQDWLNGKEYKCKVSNKALPAPIEKTISKAKGQPREPQVYTLPPSRDELTKNQVSLTCLVKGFYPSDIAVEWESNGQPENNYKTTPPVLDSDGSFFLYSKLTVDKSRWQQGNVFSCSVMHEALHNHYTQKSLSLSPGK

SEQ ID NO: 243 - DNA, 1215 bp, Artificial Sequence
  CDS (1)..(1215)
  Nucleotide sequence of Chimera A-E57L-Fc(Eg1S LALAGA)
gagacctttccccctaagtacctccattacgacgaagaaacaagccaccaactcctctgtgacaagtgccccccagggacatatttgaaacagcactgtaccgcaaagtggaaaacagtatgcgccccttgcccaccaagacactacactcagttttggaattacctgctgagatgccgctattgtaacgttctgtgtggtgagcgtgaggaagaagctcgagcatgccatgctactcacaatcgtgcttgccggtgtagaaccggtttttttgcccatgcaggcttctgcctggaacatgcaagctgtccccctggcgctggcgttatcgcacccggaactcctagccagaatacacaatgtcagccttgccctgacggctttttctctaatgagacttcaagtaaagctccctgccgcaagcacaccaactgtagtgtgtttgggttgttgctgacccagaaggggaacgcaactcacgacaacatttgtagcgggaattcagaaagcacccaaaaggagcccaaatcttccgacaaaactcacacatgcccaccgtgcccagcacctgaagccgctggggccccgtcagtcttcctcttccccccaaaacccaaggacaccctcatgatctcccggacccctgaggtcacatgcgtggtggtggacgtgagccacgaagaccctgaggtcaagttcaactggtacgtggacggcgtggaggtgcataatgccaagacaaagccgcgggaggagcagtacaacagcacgtaccgtgtggtcagcgtcctcaccgtcctgcaccaggactggctgaatggcaaggagtacaagtgcaaggtctccaacaaagccctcccagcccccatcgagaaaaccatctccaaagccaaagggcagccccgagaaccacaggtgtacaccctgcccccatcccgggatgagctgaccaagaaccaggtcagcctgacctgcctggtcaaaggcttctatcccagcgacatcgccgtggagtgggagagcaatgggcagccggagaacaactacaagaccacgcctcccgtgctggactccgacggctccttcttcctctacagcaagctcaccgtggacaagagcaggtggcagcaggggaacgtcttctcatgctccgtgatgcatgaggctctgcacaaccactacacgcagaagagcctctccctgtctccgggcaaa

SEQ ID NO: 244 - protein, 405 aa, Artificial Sequence
  Amino acid sequence of Chimera A-E57L-Fc(Eg1S LALAGA)
ETFPPKYLHYDEETSHQLLCDKCPPGTYLKQHCTAKWKTVCAPCPPRHYTQFWNYLLRCRYCNVLCGEREEEARACHATHNRACRCRTGFFAHAGFCLEHASCPPGAGVIAPGTPSQNTQCQPCPDGFFSNETSSKAPCRKHTNCSVFGLLLTQKGNATHDNICSGNSESTQKEPKSSDKTHTCPPCPAPEAAGAPSVFLFPPKPKDTLMISRTPEVTCVVVDVSHEDPEVKFNWYVDGVEVHNAKTKPREEQYNSTYRVVSVLTVLHQDWLNGKEYKCKVSNKALPAPIEKTISKAKGQPREPQVYTLPPSRDELTKNQVSLTCLVKGFYPSDIAVEWESNGQPENNYKTTPPVLDSDGSFFLYSKLTVDKSRWQQGNVFSCSVMHEALHNHYTQKSLSLSPGK

SEQ ID NO: 245 - DNA, 1215 bp, Artificial Sequence
  CDS (1)..(1215)
  Nucleotide sequence of Chimera A-E57R-Fc(Eg1S LALAGA)
gagacctttccccctaagtacctccattacgacgaagaaacaagccaccaactcctctgtgacaagtgccccccagggacatatttgaaacagcactgtaccgcaaagtggaaaacagtatgcgccccttgcccaccaagacactacactcagttttggaattacctgcggagatgccgctattgtaacgttctgtgtggtgagcgtgaggaagaagctcgagcatgccatgctactcacaatcgtgcttgccggtgtagaaccggtttttttgcccatgcaggcttctgcctggaacatgcaagctgtccccctggcgctggcgttatcgcacccggaactcctagccagaatacacaatgtcagccttgccctgacggctttttctctaatgagacttcaagtaaagctccctgccgcaagcacaccaactgtagtgtgtttgggttgttgctgacccagaaggggaacgcaactcacgacaacatttgtagcgggaattcagaaagcacccaaaaggagcccaaatcttccgacaaaactcacacatgcccaccgtgcccagcacctgaagccgctggggccccgtcagtcttcctcttccccccaaaacccaaggacaccctcatgatctcccggacccctgaggtcacatgcgtggtggtggacgtgagccacgaagaccctgaggtcaagttcaactggtacgtggacggcgtggaggtgcataatgccaagacaaagccgcgggaggagcagtacaacagcacgtaccgtgtggtcagcgtcctcaccgtcctgcaccaggactggctgaatggcaaggagtacaagtgcaaggtctccaacaaagccctcccagcccccatcgagaaaaccatctccaaagccaaagggcagccccgagaaccacaggtgtacaccctgcccccatcccgggatgagctgaccaagaaccaggtcagcctgacctgcctggtcaaaggcttctatcccagcgacatcgccgtggagtgggagagcaatgggcagccggagaacaactacaagaccacgcctcccgtgctggactccgacggctccttcttcctctacagcaagctcaccgtggacaagagcaggtggcagcaggggaacgtcttctcatgctccgtgatgcatgaggctctgcacaaccactacacgcagaagagcctctccctgtctccgggcaaa

SEQ ID NO: 246 - protein, 405 aa, Artificial Sequence
  Amino acid sequence of Chimera A-E57R-Fc(Eg1S LALAGA)
ETFPPKYLHYDEETSHQLLCDKCPPGTYLKQHCTAKWKTVCAPCPPRHYTQFWNYLRRCRYCNVLCGEREEEARACHATHNRACRCRTGFFAHAGFCLEHASCPPGAGVIAPGTPSQNTQCQPCPDGFFSNETSSKAPCRKHTNCSVFGLLLTQKGNATHDNICSGNSESTQKEPKSSDKTHTCPPCPAPEAAGAPSVFLFPPKPKDTLMISRTPEVTCVVVDVSHEDPEVKFNWYVDGVEVHNAKTKPREEQYNSTYRVVSVLTVLHQDWLNGKEYKCKVSNKALPAPIEKTISKAKGQPREPQVYTLPPSRDELTKNQVSLTCLVKGFYPSDIAVEWESNGQPENNYKTTPPVLDSDGSFFLYSKLTVDKSRWQQGNVFSCSVMHEALHNHYTQKSLSLSPGK

SEQ ID NO: 247 - DNA, 1215 bp, Artificial Sequence
  CDS (1)..(1215)
  Nucleotide sequence of Chimera A-E57V-Fc(Eg1S LALAGA)
gagacctttccccctaagtacctccattacgacgaagaaacaagccaccaactcctctgtgacaagtgccccccagggacatatttgaaacagcactgtaccgcaaagtggaaaacagtatgcgccccttgcccaccaagacactacactcagttttggaattacctggtgagatgccgctattgtaacgttctgtgtggtgagcgtgaggaagaagctcgagcatgccatgctactcacaatcgtgcttgccggtgtagaaccggtttttttgcccatgcaggcttctgcctggaacatgcaagctgtccccctggcgctggcgttatcgcacccggaactcctagccagaatacacaatgtcagccttgccctgacggctttttctctaatgagacttcaagtaaagctccctgccgcaagcacaccaactgtagtgtgtttgggttgttgctgacccagaaggggaacgcaactcacgacaacatttgtagcgggaattcagaaagcacccaaaaggagcccaaatcttccgacaaaactcacacatgcccaccgtgcccagcacctgaagccgctggggccccgtcagtcttcctcttccccccaaaacccaaggacaccctcatgatctcccggacccctgaggtcacatgcgtggtggtggacgtgagccacgaagaccctgaggtcaagttcaactggtacgtggacggcgtggaggtgcataatgccaagacaaagccgcgggaggagcagtacaacagcacgtaccgtgtggtcagcgtcctcaccgtcctgcaccaggactggctgaatggcaaggagtacaagtgcaaggtctccaacaaagccctcccagcccccatcgagaaaaccatctccaaagccaaagggcagccccgagaaccacaggtgtacaccctgcccccatcccgggatgagctgaccaagaaccaggtcagcctgacctgcctggtcaaaggcttctatcccagcgacatcgccgtggagtgggagagcaatgggcagccggagaacaactacaagaccacgcctcccgtgctggactccgacggctccttcttcctctacagcaagctcaccgtggacaagagcaggtggcagcaggggaacgtcttctcatgctccgtgatgcatgaggctctgcacaaccactacacgcagaagagcctctccctgtctccgggcaaa

SEQ ID NO: 248 - protein, 405 aa, Artificial Sequence
  Amino acid sequence of Chimera A-E57V-Fc(Eg1S LALAGA)
ETFPPKYLHYDEETSHQLLCDKCPPGTYLKQHCTAKWKTVCAPCPPRHYTQFWNYLVRCRYCNVLCGEREEEARACHATHNRACRCRTGFFAHAGFCLEHASCPPGAGVIAPGTPSQNTQCQPCPDGFFSNETSSKAPCRKHTNCSVFGLLLTQKGNATHDNICSGNSESTQKEPKSSDKTHTCPPCPAPEAAGAPSVFLFPPKPKDTLMISRTPEVTCVVVDVSHEDPEVKFNWYVDGVEVHNAKTKPREEQYNSTYRVVSVLTVLHQDWLNGKEYKCKVSNKALPAPIEKTISKAKGQPREPQVYTLPPSRDELTKNQVSLTCLVKGFYPSDIAVEWESNGQPENNYKTTPPVLDSDGSFFLYSKLTVDKSRWQQGNVFSCSVMHEALHNHYTQKSLSLSPGK

SEQ ID NO: 249 - DNA, 1215 bp, Artificial Sequence
  CDS (1)..(1215)
  Nucleotide sequence of Chimera A-E57K_R58D-Fc(Eg1S LALAGA)
gagacctttccccctaagtacctccattacgacgaagaaacaagccaccaactcctctgtgacaagtgccccccagggacatatttgaaacagcactgtaccgcaaagtggaaaacagtatgcgccccttgcccaccaagacactacactcagttttggaattacctgaaggactgccgctattgtaacgttctgtgtggtgagcgtgaggaagaagctcgagcatgccatgctactcacaatcgtgcttgccggtgtagaaccggtttttttgcccatgcaggcttctgcctggaacatgcaagctgtccccctggcgctggcgttatcgcacccggaactcctagccagaatacacaatgtcagccttgccctgacggctttttctctaatgagacttcaagtaaagctccctgccgcaagcacaccaactgtagtgtgtttgggttgttgctgacccagaaggggaacgcaactcacgacaacatttgtagcgggaattcagaaagcacccaaaaggagcccaaatcttccgacaaaactcacacatgcccaccgtgcccagcacctgaagccgctggggccccgtcagtcttcctcttccccccaaaacccaaggacaccctcatgatctcccggacccctgaggtcacatgcgtggtggtggacgtgagccacgaagaccctgaggtcaagttcaactggtacgtggacggcgtggaggtgcataatgccaagacaaagccgcgggaggagcagtacaacagcacgtaccgtgtggtcagcgtcctcaccgtcctgcaccaggactggctgaatggcaaggagtacaagtgcaaggtctccaacaaagccctcccagcccccatcgagaaaaccatctccaaagccaaagggcagccccgagaaccacaggtgtacaccctgcccccatcccgggatgagctgaccaagaaccaggtcagcctgacctgcctggtcaaaggcttctatcccagcgacatcgccgtggagtgggagagcaatgggcagccggagaacaactacaagaccacgcctcccgtgctggactccgacggctccttcttcctctacagcaagctcaccgtggacaagagcaggtggcagcaggggaacgtcttctcatgctccgtgatgcatgaggctctgcacaaccactacacgcagaagagcctctccctgtctccgggcaaa

SEQ ID NO: 250 - protein, 405 aa, Artificial Sequence
  Amino acid sequence of Chimera A-E57K_R58D-Fc(Eg1S LALAGA)
ETFPPKYLHYDEETSHQLLCDKCPPGTYLKQHCTAKWKTVCAPCPPRHYTQFWNYLKDCRYCNVLCGEREEEARACHATHNRACRCRTGFFAHAGFCLEHASCPPGAGVIAPGTPSQNTQCQPCPDGFFSNETSSKAPCRKHTNCSVFGLLLTQKGNATHDNICSGNSESTQKEPKSSDKTHTCPPCPAPEAAGAPSVFLFPPKPKDTLMISRTPEVTCVVVDVSHEDPEVKFNWYVDGVEVHNAKTKPREEQYNSTYRVVSVLTVLHQDWLNGKEYKCKVSNKALPAPIEKTISKAKGQPREPQVYTLPPSRDELTKNQVSLTCLVKGFYPSDIAVEWESNGQPENNYKTTPPVLDSDGSFFLYSKLTVDKSRWQQGNVFSCSVMHEALHNHYTQKSLSLSPGK

SEQ ID NO: 251 - DNA, 1215 bp, Artificial Sequence
  CDS (1)..(1215)
  Nucleotide sequence of Chimera A-E57K_R58E-Fc(Eg1S LALAGA)
gagacctttccccctaagtacctccattacgacgaagaaacaagccaccaactcctctgtgacaagtgccccccagggacatatttgaaacagcactgtaccgcaaagtggaaaacagtatgcgccccttgcccaccaagacactacactcagttttggaattacctgaaggagtgccgctattgtaacgttctgtgtggtgagcgtgaggaagaagctcgagcatgccatgctactcacaatcgtgcttgccggtgtagaaccggtttttttgcccatgcaggcttctgcctggaacatgcaagctgtccccctggcgctggcgttatcgcacccggaactcctagccagaatacacaatgtcagccttgccctgacggctttttctctaatgagacttcaagtaaagctccctgccgcaagcacaccaactgtagtgtgtttgggttgttgctgacccagaaggggaacgcaactcacgacaacatttgtagcgggaattcagaaagcacccaaaaggagcccaaatcttccgacaaaactcacacatgcccaccgtgcccagcacctgaagccgctggggccccgtcagtcttcctcttccccccaaaacccaaggacaccctcatgatctcccggacccctgaggtcacatgcgtggtggtggacgtgagccacgaagaccctgaggtcaagttcaactggtacgtggacggcgtggaggtgcataatgccaagacaaagccgcgggaggagcagtacaacagcacgtaccgtgtggtcagcgtcctcaccgtcctgcaccaggactggctgaatggcaaggagtacaagtgcaaggtctccaacaaagccctcccagcccccatcgagaaaaccatctccaaagccaaagggcagccccgagaaccacaggtgtacaccctgcccccatcccgggatgagctgaccaagaaccaggtcagcctgacctgcctggtcaaaggcttctatcccagcgacatcgccgtggagtgggagagcaatgggcagccggagaacaactacaagaccacgcctcccgtgctggactccgacggctccttcttcctctacagcaagctcaccgtggacaagagcaggtggcagcaggggaacgtcttctcatgctccgtgatgcatgaggctctgcacaaccactacacgcagaagagcctctccctgtctccgggcaaa

SEQ ID NO: 252 - protein, 405 aa, Artificial Sequence
  Amino acid sequence of Chimera A-E57K_R58E-Fc(Eg1S LALAGA)
ETFPPKYLHYDEETSHQLLCDKCPPGTYLKQHCTAKWKTVCAPCPPRHYTQFWNYLKECRYCNVLCGEREEEARACHATHNRACRCRTGFFAHAGFCLEHASCPPGAGVIAPGTPSQNTQCQPCPDGFFSNETSSKAPCRKHTNCSVFGLLLTQKGNATHDNICSGNSESTQKEPKSSDKTHTCPPCPAPEAAGAPSVFLFPPKPKDTLMISRTPEVTCVVVDVSHEDPEVKFNWYVDGVEVHNAKTKPREEQYNSTYRVVSVLTVLHQDWLNGKEYKCKVSNKALPAPIEKTISKAKGQPREPQVYTLPPSRDELTKNQVSLTCLVKGFYPSDIAVEWESNGQPENNYKTTPPVLDSDGSFFLYSKLTVDKSRWQQGNVFSCSVMHEALHNHYTQKSLSLSPGK

SEQ ID NO: 253 - DNA, 1215 bp, Artificial Sequence
  CDS (1)..(1215)
  Nucleotide sequence of Chimera A-E57R_R58D-Fc(Eg1S LALAGA)
gagacctttccccctaagtacctccattacgacgaagaaacaagccaccaactcctctgtgacaagtgccccccagggacatatttgaaacagcactgtaccgcaaagtggaaaacagtatgcgccccttgcccaccaagacactacactcagttttggaattacctgcgggactgccgctattgtaacgttctgtgtggtgagcgtgaggaagaagctcgagcatgccatgctactcacaatcgtgcttgccggtgtagaaccggtttttttgcccatgcaggcttctgcctggaacatgcaagctgtccccctggcgctggcgttatcgcacccggaactcctagccagaatacacaatgtcagccttgccctgacggctttttctctaatgagacttcaagtaaagctccctgccgcaagcacaccaactgtagtgtgtttgggttgttgctgacccagaaggggaacgcaactcacgacaacatttgtagcgggaattcagaaagcacccaaaaggagcccaaatcttccgacaaaactcacacatgcccaccgtgcccagcacctgaagccgctggggccccgtcagtcttcctcttccccccaaaacccaaggacaccctcatgatctcccggacccctgaggtcacatgcgtggtggtggacgtgagccacgaagaccctgaggtcaagttcaactggtacgtggacggcgtggaggtgcataatgccaagacaaagccgcgggaggagcagtacaacagcacgtaccgtgtggtcagcgtcctcaccgtcctgcaccaggactggctgaatggcaaggagtacaagtgcaaggtctccaacaaagccctcccagcccccatcgagaaaaccatctccaaagccaaagggcagccccgagaaccacaggtgtacaccctgcccccatcccgggatgagctgaccaagaaccaggtcagcctgacctgcctggtcaaaggcttctatcccagcgacatcgccgtggagtgggagagcaatgggcagccggagaacaactacaagaccacgcctcccgtgctggactccgacggctccttcttcctctacagcaagctcaccgtggacaagagcaggtggcagcaggggaacgtcttctcatgctccgtgatgcatgaggctctgcacaaccactacacgcagaagagcctctccctgtctccgggcaaa

SEQ ID NO: 254 - protein, 405 aa, Artificial Sequence
  Amino acid sequence of Chimera A-E57R_R58D-Fc(Eg1S LALAGA)
ETFPPKYLHYDEETSHQLLCDKCPPGTYLKQHCTAKWKTVCAPCPPRHYTQFWNYLRDCRYCNVLCGEREEEARACHATHNRACRCRTGFFAHAGFCLEHASCPPGAGVIAPGTPSQNTQCQPCPDGFFSNETSSKAPCRKHTNCSVFGLLLTQKGNATHDNICSGNSESTQKEPKSSDKTHTCPPCPAPEAAGAPSVFLFPPKPKDTLMISRTPEVTCVVVDVSHEDPEVKFNWYVDGVEVHNAKTKPREEQYNSTYRVVSVLTVLHQDWLNGKEYKCKVSNKALPAPIEKTISKAKGQPREPQVYTLPPSRDELTKNQVSLTCLVKGFYPSDIAVEWESNGQPENNYKTTPPVLDSDGSFFLYSKLTVDKSRWQQGNVFSCSVMHEALHNHYTQKSLSLSPGK

SEQ ID NO: 255 - DNA, 1215 bp, Artificial Sequence
  CDS (1)..(1215)
  Nucleotide sequence of Chimera A-E57K-Fc(Eg1S LALAGANA)
gagacctttccccctaagtacctccattacgacgaagaaacaagccaccaactcctctgtgacaagtgccccccagggacatatttgaaacagcactgtaccgcaaagtggaaaacagtatgcgccccttgcccaccaagacactacactcagttttggaattacctgaagagatgccgctattgtaacgttctgtgtggtgagcgtgaggaagaagctcgagcatgccatgctactcacaatcgtgcttgccggtgtagaaccggtttttttgcccatgcaggcttctgcctggaacatgcaagctgtccccctggcgctggcgttatcgcacccggaactcctagccagaatacacaatgtcagccttgccctgacggctttttctctaatgagacttcaagtaaagctccctgccgcaagcacaccaactgtagtgtgtttgggttgttgctgacccagaaggggaacgcaactcacgacaacatttgtagcgggaattcagaaagcacccaaaaggagcccaaatcttccgacaaaactcacacatgcccaccgtgcccagcacctgaagccgctggggccccgtcagtcttcctcttccccccaaaacccaaggacaccctcatgatctcccggacccctgaggtcacatgcgtggtggtggacgtgagccacgaagaccctgaggtcaagttcaactggtacgtggacggcgtggaggtgcataatgccaagacaaagccgcgggaggagcagtacaacagcacgtaccgtgtggtcagcgtcctcaccgtcctgcaccaggactggctgaatggcaaggagtacaagtgcaaggtctccaacaaagccctcccagcccccatcgagaaaaccatctccaaagccaaagggcagccccgagaaccacaggtgtacaccctgcccccatcccgggatgagctgaccaagaaccaggtcagcctgacctgcctggtcaaaggcttctatcccagcgacatcgccgtggagtgggagagcaatgggcagccggagaacaactacaagaccacgcctcccgtgctggactccgacggctccttcttcctctacagcaagctcaccgtggacaagagcaggtggcagcaggggaacgtcttctcatgctccgtgatgcatgaggctctgcacgcccactacacgcagaagagcctctccctgtctccgggtaaa

SEQ ID NO: 256 - protein, 405 aa, Artificial Sequence
  Amino acid sequence of Chimera A-E57K-Fc(Eg1S LALAGANA)
ETFPPKYLHYDEETSHQLLCDKCPPGTYLKQHCTAKWKTVCAPCPPRHYTQFWNYLKRCRYCNVLCGEREEEARACHATHNRACRCRTGFFAHAGFCLEHASCPPGAGVIAPGTPSQNTQCQPCPDGFFSNETSSKAPCRKHTNCSVFGLLLTQKGNATHDNICSGNSESTQKEPKSSDKTHTCPPCPAPEAAGAPSVFLFPPKPKDTLMISRTPEVTCVVVDVSHEDPEVKFNWYVDGVEVHNAKTKPREEQYNSTYRVVSVLTVLHQDWLNGKEYKCKVSNKALPAPIEKTISKAKGQPREPQVYTLPPSRDELTKNQVSLTCLVKGFYPSDIAVEWESNGQPENNYKTTPPVLDSDGSFFLYSKLTVDKSRWQQGNVFSCSVMHEALHAHYTQKSLSLSPGK

SEQ ID NO: 257 - DNA, 1215 bp, Artificial Sequence
  CDS (1)..(1215)
  Nucleotide sequence of Chimera A-E57L-Fc(Eg1S LALAGANA)
gagacctttccccctaagtacctccattacgacgaagaaacaagccaccaactcctctgtgacaagtgccccccagggacatatttgaaacagcactgtaccgcaaagtggaaaacagtatgcgccccttgcccaccaagacactacactcagttttggaattacctgctgagatgccgctattgtaacgttctgtgtggtgagcgtgaggaagaagctcgagcatgccatgctactcacaatcgtgcttgccggtgtagaaccggtttttttgcccatgcaggcttctgcctggaacatgcaagctgtccccctggcgctggcgttatcgcacccggaactcctagccagaatacacaatgtcagccttgccctgacggctttttctctaatgagacttcaagtaaagctccctgccgcaagcacaccaactgtagtgtgtttgggttgttgctgacccagaaggggaacgcaactcacgacaacatttgtagcgggaattcagaaagcacccaaaaggagcccaaatcttccgacaaaactcacacatgcccaccgtgcccagcacctgaagccgctggggccccgtcagtcttcctcttccccccaaaacccaaggacaccctcatgatctcccggacccctgaggtcacatgcgtggtggtggacgtgagccacgaagaccctgaggtcaagttcaactggtacgtggacggcgtggaggtgcataatgccaagacaaagccgcgggaggagcagtacaacagcacgtaccgtgtggtcagcgtcctcaccgtcctgcaccaggactggctgaatggcaaggagtacaagtgcaaggtctccaacaaagccctcccagcccccatcgagaaaaccatctccaaagccaaagggcagccccgagaaccacaggtgtacaccctgcccccatcccgggatgagctgaccaagaaccaggtcagcctgacctgcctggtcaaaggcttctatcccagcgacatcgccgtggagtgggagagcaatgggcagccggagaacaactacaagaccacgcctcccgtgctggactccgacggctccttcttcctctacagcaagctcaccgtggacaagagcaggtggcagcaggggaacgtcttctcatgctccgtgatgcatgaggctctgcacgcccactacacgcagaagagcctctccctgtctccgggtaaa

SEQ ID NO: 258 - protein, 405 aa, Artificial Sequence
  Amino acid sequence of Chimera A-E57L-Fc(Eg1S LALAGANA)
ETFPPKYLHYDEETSHQLLCDKCPPGTYLKQHCTAKWKTVCAPCPPRHYTQFWNYLLRCRYCNVLCGEREEEARACHATHNRACRCRTGFFAHAGFCLEHASCPPGAGVIAPGTPSQNTQCQPCPDGFFSNETSSKAPCRKHTNCSVFGLLLTQKGNATHDNICSGNSESTQKEPKSSDKTHTCPPCPAPEAAGAPSVFLFPPKPKDTLMISRTPEVTCVVVDVSHEDPEVKFNWYVDGVEVHNAKTKPREEQYNSTYRVVSVLTVLHQDWLNGKEYKCKVSNKALPAPIEKTISKAKGQPREPQVYTLPPSRDELTKNQVSLTCLVKGFYPSDIAVEWESNGQPENNYKTTPPVLDSDGSFFLYSKLTVDKSRWQQGNVFSCSVMHEALHAHYTQKSLSLSPGK

SEQ ID NO: 259 - DNA, 1215 bp, Artificial Sequence
  CDS (1)..(1215)
  Nucleotide sequence of Chimera A-E57R-Fc(Eg1S LALAGANA)
gagacctttccccctaagtacctccattacgacgaagaaacaagccaccaactcctctgtgacaagtgccccccagggacatatttgaaacagcactgtaccgcaaagtggaaaacagtatgcgccccttgcccaccaagacactacactcagttttggaattacctgcggagatgccgctattgtaacgttctgtgtggtgagcgtgaggaagaagctcgagcatgccatgctactcacaatcgtgcttgccggtgtagaaccggtttttttgcccatgcaggcttctgcctggaacatgcaagctgtccccctggcgctggcgttatcgcacccggaactcctagccagaatacacaatgtcagccttgccctgacggctttttctctaatgagacttcaagtaaagctccctgccgcaagcacaccaactgtagtgtgtttgggttgttgctgacccagaaggggaacgcaactcacgacaacatttgtagcgggaattcagaaagcacccaaaaggagcccaaatcttccgacaaaactcacacatgcccaccgtgcccagcacctgaagccgctggggccccgtcagtcttcctcttccccccaaaacccaaggacaccctcatgatctcccggacccctgaggtcacatgcgtggtggtggacgtgagccacgaagaccctgaggtcaagttcaactggtacgtggacggcgtggaggtgcataatgccaagacaaagccgcgggaggagcagtacaacagcacgtaccgtgtggtcagcgtcctcaccgtcctgcaccaggactggctgaatggcaaggagtacaagtgcaaggtctccaacaaagccctcccagcccccatcgagaaaaccatctccaaagccaaagggcagccccgagaaccacaggtgtacaccctgcccccatcccgggatgagctgaccaagaaccaggtcagcctgacctgcctggtcaaaggcttctatcccagcgacatcgccgtggagtgggagagcaatgggcagccggagaacaactacaagaccacgcctcccgtgctggactccgacggctccttcttcctctacagcaagctcaccgtggacaagagcaggtggcagcaggggaacgtcttctcatgctccgtgatgcatgaggctctgcacgcccactacacgcagaagagcctctccctgtctccgggtaaa

SEQ ID NO: 260 - protein, 405 aa, Artificial Sequence
  Amino acid sequence of Chimera A-E57R-Fc(Eg1S LALAGANA)
ETFPPKYLHYDEETSHQLLCDKCPPGTYLKQHCTAKWKTVCAPCPPRHYTQFWNYLRRCRYCNVLCGEREEEARACHATHNRACRCRTGFFAHAGFCLEHASCPPGAGVIAPGTPSQNTQCQPCPDGFFSNETSSKAPCRKHTNCSVFGLLLTQKGNATHDNICSGNSESTQKEPKSSDKTHTCPPCPAPEAAGAPSVFLFPPKPKDTLMISRTPEVTCVVVDVSHEDPEVKFNWYVDGVEVHNAKTKPREEQYNSTYRVVSVLTVLHQDWLNGKEYKCKVSNKALPAPIEKTISKAKGQPREPQVYTLPPSRDELTKNQVSLTCLVKGFYPSDIAVEWESNGQPENNYKTTPPVLDSDGSFFLYSKLTVDKSRWQQGNVFSCSVMHEALHAHYTQKSLSLSPGK

SEQ ID NO: 261 - DNA, 1215 bp, Artificial Sequence
  CDS (1)..(1215)
  Nucleotide sequence of Chimera A-E57V-Fc(Eg1S LALAGANA)
gagacctttccccctaagtacctccattacgacgaagaaacaagccaccaactcctctgtgacaagtgccccccagggacatatttgaaacagcactgtaccgcaaagtggaaaacagtatgcgccccttgcccaccaagacactacactcagttttggaattacctggtgagatgccgctattgtaacgttctgtgtggtgagcgtgaggaagaagctcgagcatgccatgctactcacaatcgtgcttgccggtgtagaaccggtttttttgcccatgcaggcttctgcctggaacatgcaagctgtccccctggcgctggcgttatcgcacccggaactcctagccagaatacacaatgtcagccttgccctgacggctttttctctaatgagacttcaagtaaagctccctgccgcaagcacaccaactgtagtgtgtttgggttgttgctgacccagaaggggaacgcaactcacgacaacatttgtagcgggaattcagaaagcacccaaaaggagcccaaatcttccgacaaaactcacacatgcccaccgtgcccagcacctgaagccgctggggccccgtcagtcttcctcttccccccaaaacccaaggacaccctcatgatctcccggacccctgaggtcacatgcgtggtggtggacgtgagccacgaagaccctgaggtcaagttcaactggtacgtggacggcgtggaggtgcataatgccaagacaaagccgcgggaggagcagtacaacagcacgtaccgtgtggtcagcgtcctcaccgtcctgcaccaggactggctgaatggcaaggagtacaagtgcaaggtctccaacaaagccctcccagcccccatcgagaaaaccatctccaaagccaaagggcagccccgagaaccacaggtgtacaccctgcccccatcccgggatgagctgaccaagaaccaggtcagcctgacctgcctggtcaaaggcttctatcccagcgacatcgccgtggagtgggagagcaatgggcagccggagaacaactacaagaccacgcctcccgtgctggactccgacggctccttcttcctctacagcaagctcaccgtggacaagagcaggtggcagcaggggaacgtcttctcatgctccgtgatgcatgaggctctgcacgcccactacacgcagaagagcctctccctgtctccgggtaaa

SEQ ID NO: 262 - protein, 405 aa, Artificial Sequence
  Amino acid sequence of Chimera A-E57V-Fc(Eg1S LALAGANA)
ETFPPKYLHYDEETSHQLLCDKCPPGTYLKQHCTAKWKTVCAPCPPRHYTQFWNYLVRCRYCNVLCGEREEEARACHATHNRACRCRTGFFAHAGFCLEHASCPPGAGVIAPGTPSQNTQCQPCPDGFFSNETSSKAPCRKHTNCSVFGLLLTQKGNATHDNICSGNSESTQKEPKSSDKTHTCPPCPAPEAAGAPSVFLFPPKPKDTLMISRTPEVTCVVVDVSHEDPEVKFNWYVDGVEVHNAKTKPREEQYNSTYRVVSVLTVLHQDWLNGKEYKCKVSNKALPAPIEKTISKAKGQPREPQVYTLPPSRDELTKNQVSLTCLVKGFYPSDIAVEWESNGQPENNYKTTPPVLDSDGSFFLYSKLTVDKSRWQQGNVFSCSVMHEALHAHYTQKSLSLSPGK

SEQ ID NO: 263 - DNA, 1215 bp, Artificial Sequence
  CDS (1)..(1215)
  Nucleotide sequence of Chimera A-E57K_R58D-Fc(Eg1S LALAGANA)
gagacctttccccctaagtacctccattacgacgaagaaacaagccaccaactcctctgtgacaagtgccccccagggacatatttgaaacagcactgtaccgcaaagtggaaaacagtatgcgccccttgcccaccaagacactacactcagttttggaattacctgaaggactgccgctattgtaacgttctgtgtggtgagcgtgaggaagaagctcgagcatgccatgctactcacaatcgtgcttgccggtgtagaaccggtttttttgcccatgcaggcttctgcctggaacatgcaagctgtccccctggcgctggcgttatcgcacccggaactcctagccagaatacacaatgtcagccttgccctgacggctttttctctaatgagacttcaagtaaagctccctgccgcaagcacaccaactgtagtgtgtttgggttgttgctgacccagaaggggaacgcaactcacgacaacatttgtagcgggaattcagaaagcacccaaaaggagcccaaatcttccgacaaaactcacacatgcccaccgtgcccagcacctgaagccgctggggccccgtcagtcttcctcttccccccaaaacccaaggacaccctcatgatctcccggacccctgaggtcacatgcgtggtggtggacgtgagccacgaagaccctgaggtcaagttcaactggtacgtggacggcgtggaggtgcataatgccaagacaaagccgcgggaggagcagtacaacagcacgtaccgtgtggtcagcgtcctcaccgtcctgcaccaggactggctgaatggcaaggagtacaagtgcaaggtctccaacaaagccctcccagcccccatcgagaaaaccatctccaaagccaaagggcagccccgagaaccacaggtgtacaccctgcccccatcccgggatgagctgaccaagaaccaggtcagcctgacctgcctggtcaaaggcttctatcccagcgacatcgccgtggagtgggagagcaatgggcagccggagaacaactacaagaccacgcctcccgtgctggactccgacggctccttcttcctctacagcaagctcaccgtggacaagagcaggtggcagcaggggaacgtcttctcatgctccgtgatgcatgaggctctgcacgcccactacacgcagaagagcctctccctgtctccgggtaaa

SEQ ID NO: 264 - protein, 405 aa, Artificial Sequence
  Amino acid sequence of Chimera A-E57K_R58D-Fc(Eg1S LALAGANA)
ETFPPKYLHYDEETSHQLLCDKCPPGTYLKQHCTAKWKTVCAPCPPRHYTQFWNYLKDCRYCNVLCGEREEEARACHATHNRACRCRTGFFAHAGFCLEHASCPPGAGVIAPGTPSQNTQCQPCPDGFFSNETSSKAPCRKHTNCSVFGLLLTQKGNATHDNICSGNSESTQKEPKSSDKTHTCPPCPAPEAAGAPSVFLFPPKPKDTLMISRTPEVTCVVVDVSHEDPEVKFNWYVDGVEVHNAKTKPREEQYNSTYRVVSVLTVLHQDWLNGKEYKCKVSNKALPAPIEKTISKAKGQPREPQVYTLPPSRDELTKNQVSLTCLVKGFYPSDIAVEWESNGQPENNYKTTPPVLDSDGSFFLYSKLTVDKSRWQQGNVFSCSVMHEALHAHYTQKSLSLSPGK

SEQ ID NO: 265 - DNA, 1215 bp, Artificial Sequence
  CDS (1)..(1215)
  Nucleotide sequence of Chimera A-E57K_R58E-Fc(Eg1S LALAGANA)
gagacctttccccctaagtacctccattacgacgaagaaacaagccaccaactcctctgtgacaagtgccccccagggacatatttgaaacagcactgtaccgcaaagtggaaaacagtatgcgccccttgcccaccaagacactacactcagttttggaattacctgaaggagtgccgctattgtaacgttctgtgtggtgagcgtgaggaagaagctcgagcatgccatgctactcacaatcgtgcttgccggtgtagaaccggtttttttgcccatgcaggcttctgcctggaacatgcaagctgtccccctggcgctggcgttatcgcacccggaactcctagccagaatacacaatgtcagccttgccctgacggctttttctctaatgagacttcaagtaaagctccctgccgcaagcacaccaactgtagtgtgtttgggttgttgctgacccagaaggggaacgcaactcacgacaacatttgtagcgggaattcagaaagcacccaaaaggagcccaaatcttccgacaaaactcacacatgcccaccgtgcccagcacctgaagccgctggggccccgtcagtcttcctcttccccccaaaacccaaggacaccctcatgatctcccggacccctgaggtcacatgcgtggtggtggacgtgagccacgaagaccctgaggtcaagttcaactggtacgtggacggcgtggaggtgcataatgccaagacaaagccgcgggaggagcagtacaacagcacgtaccgtgtggtcagcgtcctcaccgtcctgcaccaggactggctgaatggcaaggagtacaagtgcaaggtctccaacaaagccctcccagcccccatcgagaaaaccatctccaaagccaaagggcagccccgagaaccacaggtgtacaccctgcccccatcccgggatgagctgaccaagaaccaggtcagcctgacctgcctggtcaaaggcttctatcccagcgacatcgccgtggagtgggagagcaatgggcagccggagaacaactacaagaccacgcctcccgtgctggactccgacggctccttcttcctctacagcaagctcaccgtggacaagagcaggtggcagcaggggaacgtcttctcatgctccgtgatgcatgaggctctgcacgcccactacacgcagaagagcctctccctgtctccgggtaaa

SEQ ID NO: 266 - protein, 405 aa, Artificial Sequence
  Amino acid sequence of Chimera A-E57K_R58E-Fc(Eg1S LALAGANA)
ETFPPKYLHYDEETSHQLLCDKCPPGTYLKQHCTAKWKTVCAPCPPRHYTQFWNYLKECRYCNVLCGEREEEARACHATHNRACRCRTGFFAHAGFCLEHASCPPGAGVIAPGTPSQNTQCQPCPDGFFSNETSSKAPCRKHTNCSVFGLLLTQKGNATHDNICSGNSESTQKEPKSSDKTHTCPPCPAPEAAGAPSVFLFPPKPKDTLMISRTPEVTCVVVDVSHEDPEVKFNWYVDGVEVHNAKTKPREEQYNSTYRVVSVLTVLHQDWLNGKEYKCKVSNKALPAPIEKTISKAKGQPREPQVYTLPPSRDELTKNQVSLTCLVKGFYPSDIAVEWESNGQPENNYKTTPPVLDSDGSFFLYSKLTVDKSRWQQGNVFSCSVMHEALHAHYTQKSLSLSPGK

SEQ ID NO: 267 - DNA, 1215 bp, Artificial Sequence
  CDS (1)..(1215)
  Nucleotide sequence of Chimera A-E57R_R58D-Fc(Eg1S LALAGANA)
gagacctttccccctaagtacctccattacgacgaagaaacaagccaccaactcctctgtgacaagtgccccccagggacatatttgaaacagcactgtaccgcaaagtggaaaacagtatgcgccccttgcccaccaagacactacactcagttttggaattacctgcgggactgccgctattgtaacgttctgtgtggtgagcgtgaggaagaagctcgagcatgccatgctactcacaatcgtgcttgccggtgtagaaccggtttttttgcccatgcaggcttctgcctggaacatgcaagctgtccccctggcgctggcgttatcgcacccggaactcctagccagaatacacaatgtcagccttgccctgacggctttttctctaatgagacttcaagtaaagctccctgccgcaagcacaccaactgtagtgtgtttgggttgttgctgacccagaaggggaacgcaactcacgacaacatttgtagcgggaattcagaaagcacccaaaaggagcccaaatcttccgacaaaactcacacatgcccaccgtgcccagcacctgaagccgctggggccccgtcagtcttcctcttccccccaaaacccaaggacaccctcatgatctcccggacccctgaggtcacatgcgtggtggtggacgtgagccacgaagaccctgaggtcaagttcaactggtacgtggacggcgtggaggtgcataatgccaagacaaagccgcgggaggagcagtacaacagcacgtaccgtgtggtcagcgtcctcaccgtcctgcaccaggactggctgaatggcaaggagtacaagtgcaaggtctccaacaaagccctcccagcccccatcgagaaaaccatctccaaagccaaagggcagccccgagaaccacaggtgtacaccctgcccccatcccgggatgagctgaccaagaaccaggtcagcctgacctgcctggtcaaaggcttctatcccagcgacatcgccgtggagtgggagagcaatgggcagccggagaacaactacaagaccacgcctcccgtgctggactccgacggctccttcttcctctacagcaagctcaccgtggacaagagcaggtggcagcaggggaacgtcttctcatgctccgtgatgcatgaggctctgcacgcccactacacgcagaagagcctctccctgtctccgggtaaa

SEQ ID NO: 268 - protein, 405 aa, Artificial Sequence
  Amino acid sequence of Chimera A-E57R_R58D-Fc(Eg1S LALAGANA)
ETFPPKYLHYDEETSHQLLCDKCPPGTYLKQHCTAKWKTVCAPCPPRHYTQFWNYLRDCRYCNVLCGEREEEARACHATHNRACRCRTGFFAHAGFCLEHASCPPGAGVIAPGTPSQNTQCQPCPDGFFSNETSSKAPCRKHTNCSVFGLLLTQKGNATHDNICSGNSESTQKEPKSSDKTHTCPPCPAPEAAGAPSVFLFPPKPKDTLMISRTPEVTCVVVDVSHEDPEVKFNWYVDGVEVHNAKTKPREEQYNSTYRVVSVLTVLHQDWLNGKEYKCKVSNKALPAPIEKTISKAKGQPREPQVYTLPPSRDELTKNQVSLTCLVKGFYPSDIAVEWESNGQPENNYKTTPPVLDSDGSFFLYSKLTVDKSRWQQGNVFSCSVMHEALHAHYTQKSLSLSPGK

SEQ ID NO: 269 - DNA, 519 bp, Artificial Sequence
  CDS (1)..(519)
  Nucleotide sequence of Chimera A-E57A
gagacctttccccctaagtacctccattacgacgaagaaacaagccaccaactcctctgtgacaagtgccccccagggacatatttgaaacagcactgtaccgcaaagtggaaaacagtatgcgccccttgcccaccaagacactacactcagttttggaattacctggccagatgccgctattgtaacgttctgtgtggtgagcgtgaggaagaagctcgagcatgccatgctactcacaatcgtgcttgccggtgtagaaccggtttttttgcccatgcaggcttctgcctggaacatgcaagctgtccccctggcgctggcgttatcgcacccggaactcctagccagaatacacaatgtcagccttgccctgacggctttttctctaatgagacttcaagtaaagctccctgccgcaagcacaccaactgtagtgtgtttgggttgttgctgacccagaaggggaacgcaactcacgacaacatttgtagcgggaattcagaaagcacccaaaag

SEQ ID NO: 270 - protein, 173 aa, Artificial Sequence
  Amino acid sequence of Chimera A-E57A
ETFPPKYLHYDEETSHQLLCDKCPPGTYLKQHCTAKWKTVCAPCPPRHYTQFWNYLARCRYCNVLCGEREEEARACHATHNRACRCRTGFFAHAGFCLEHASCPPGAGVIAPGTPSQNTQCQPCPDGFFSNETSSKAPCRKHTNCSVFGLLLTQKGNATHDNICSGNSESTQK

SEQ ID NO: 271 - DNA, 519 bp, Artificial Sequence
  CDS (1)..(519)
  Nucleotide sequence of Chimera A-E57F
gagacctttccccctaagtacctccattacgacgaagaaacaagccaccaactcctctgtgacaagtgccccccagggacatatttgaaacagcactgtaccgcaaagtggaaaacagtatgcgccccttgcccaccaagacactacactcagttttggaattacctgttcagatgccgctattgtaacgttctgtgtggtgagcgtgaggaagaagctcgagcatgccatgctactcacaatcgtgcttgccggtgtagaaccggtttttttgcccatgcaggcttctgcctggaacatgcaagctgtccccctggcgctggcgttatcgcacccggaactcctagccagaatacacaatgtcagccttgccctgacggctttttctctaatgagacttcaagtaaagctccctgccgcaagcacaccaactgtagtgtgtttgggttgttgctgacccagaaggggaacgcaactcacgacaacatttgtagcgggaattcagaaagcacccaaaag

SEQ ID NO: 272 - protein, 173 aa, Artificial Sequence
  Amino acid sequence of Chimera A-E57F
ETFPPKYLHYDEETSHQLLCDKCPPGTYLKQHCTAKWKTVCAPCPPRHYTQFWNYLFRCRYCNVLCGEREEEARACHATHNRACRCRTGFFAHAGFCLEHASCPPGAGVIAPGTPSQNTQCQPCPDGFFSNETSSKAPCRKHTNCSVFGLLLTQKGNATHDNICSGNSESTQK

SEQ ID NO: 273 - DNA, 519 bp, Artificial Sequence
  CDS (1)..(519)
  Nucleotide sequence of Chimera A-E57H
gagacctttccccctaagtacctccattacgacgaagaaacaagccaccaactcctctgtgacaagtgccccccagggacatatttgaaacagcactgtaccgcaaagtggaaaacagtatgcgccccttgcccaccaagacactacactcagttttggaattacctgcacagatgccgctattgtaacgttctgtgtggtgagcgtgaggaagaagctcgagcatgccatgctactcacaatcgtgcttgccggtgtagaaccggtttttttgcccatgcaggcttctgcctggaacatgcaagctgtccccctggcgctggcgttatcgcacccggaactcctagccagaatacacaatgtcagccttgccctgacggctttttctctaatgagacttcaagtaaagctccctgccgcaagcacaccaactgtagtgtgtttgggttgttgctgacccagaaggggaacgcaactcacgacaacatttgtagcgggaattcagaaagcacccaaaag

SEQ ID NO: 274 - protein, 173 aa, Artificial Sequence
  Amino acid sequence of Chimera A-E57H
ETFPPKYLHYDEETSHQLLCDKCPPGTYLKQHCTAKWKTVCAPCPPRHYTQFWNYLHRCRYCNVLCGEREEEARACHATHNRACRCRTGFFAHAGFCLEHASCPPGAGVIAPGTPSQNTQCQPCPDGFFSNETSSKAPCRKHTNCSVFGLLLTQKGNATHDNICSGNSESTQK

SEQ ID NO: 275 - DNA, 519 bp, Artificial Sequence
  CDS (1)..(519)
  Nucleotide sequence of Chimera A-E57I
gagacctttccccctaagtacctccattacgacgaagaaacaagccaccaactcctctgtgacaagtgccccccagggacatatttgaaacagcactgtaccgcaaagtggaaaacagtatgcgccccttgcccaccaagacactacactcagttttggaattacctgatcagatgccgctattgtaacgttctgtgtggtgagcgtgaggaagaagctcgagcatgccatgctactcacaatcgtgcttgccggtgtagaaccggtttttttgcccatgcaggcttctgcctggaacatgcaagctgtccccctggcgctggcgttatcgcacccggaactcctagccagaatacacaatgtcagccttgccctgacggctttttctctaatgagacttcaagtaaagctccctgccgcaagcacaccaactgtagtgtgtttgggttgttgctgacccagaaggggaacgcaactcacgacaacatttgtagcgggaattcagaaagcacccaaaag

SEQ ID NO: 276 - protein, 173 aa, Artificial Sequence
  Amino acid sequence of Chimera A-E57I
ETFPPKYLHYDEETSHQLLCDKCPPGTYLKQHCTAKWKTVCAPCPPRHYTQFWNYLIRCRYCNVLCGEREEEARACHATHNRACRCRTGFFAHAGFCLEHASCPPGAGVIAPGTPSQNTQCQPCPDGFFSNETSSKAPCRKHTNCSVFGLLLTQKGNATHDNICSGNSESTQK

SEQ ID NO: 277 - DNA, 519 bp, Artificial Sequence
  CDS (1)..(519)
  Nucleotide sequence of Chimera A-E57M
gagacctttccccctaagtacctccattacgacgaagaaacaagccaccaactcctctgtgacaagtgccccccagggacatatttgaaacagcactgtaccgcaaagtggaaaacagtatgcgccccttgcccaccaagacactacactcagttttggaattacctgatgagatgccgctattgtaacgttctgtgtggtgagcgtgaggaagaagctcgagcatgccatgctactcacaatcgtgcttgccggtgtagaaccggtttttttgcccatgcaggcttctgcctggaacatgcaagctgtccccctggcgctggcgttatcgcacccggaactcctagccagaatacacaatgtcagccttgccctgacggctttttctctaatgagacttcaagtaaagctccctgccgcaagcacaccaactgtagtgtgtttgggttgttgctgacccagaaggggaacgcaactcacgacaacatttgtagcgggaattcagaaagcacccaaaag

SEQ ID NO: 278 - protein, 173 aa, Artificial Sequence
  Amino acid sequence of Chimera A-E57M
ETFPPKYLHYDEETSHQLLCDKCPPGTYLKQHCTAKWKTVCAPCPPRHYTQFWNYLMRCRYCNVLCGEREEEARACHATHNRACRCRTGFFAHAGFCLEHASCPPGAGVIAPGTPSQNTQCQPCPDGFFSNETSSKAPCRKHTNCSVFGLLLTQKGNATHDNICSGNSESTQK

SEQ ID NO: 279 - DNA, 519 bp, Artificial Sequence
  CDS (1)..(519)
  Nucleotide sequence of Chimera A-E57K_R58T
gagacctttccccctaagtacctccattacgacgaagaaacaagccaccaactcctctgtgacaagtgccccccagggacatatttgaaacagcactgtaccgcaaagtggaaaacagtatgcgccccttgcccaccaagacactacactcagttttggaattacctgaagacatgccgctattgtaacgttctgtgtggtgagcgtgaggaagaagctcgagcatgccatgctactcacaatcgtgcttgccggtgtagaaccggtttttttgcccatgcaggcttctgcctggaacatgcaagctgtccccctggcgctggcgttatcgcacccggaactcctagccagaatacacaatgtcagccttgccctgacggctttttctctaatgagacttcaagtaaagctccctgccgcaagcacaccaactgtagtgtgtttgggttgttgctgacccagaaggggaacgcaactcacgacaacatttgtagcgggaattcagaaagcacccaaaag

SEQ ID NO: 280 - protein, 173 aa, Artificial Sequence
  Amino acid sequence of Chimera A-E57K_R58T
ETFPPKYLHYDEETSHQLLCDKCPPGTYLKQHCTAKWKTVCAPCPPRHYTQFWNYLKTCRYCNVLCGEREEEARACHATHNRACRCRTGFFAHAGFCLEHASCPPGAGVIAPGTPSQNTQCQPCPDGFFSNETSSKAPCRKHTNCSVFGLLLTQKGNATHDNICSGNSESTQK

SEQ ID NO: 281 - DNA, 519 bp, Artificial Sequence
  CDS (1)..(519)
  Nucleotide sequence of Chimera A-E57L_R58E
gagacctttccccctaagtacctccattacgacgaagaaacaagccaccaactcctctgtgacaagtgccccccagggacatatttgaaacagcactgtaccgcaaagtggaaaacagtatgcgccccttgcccaccaagacactacactcagttttggaattacctgctggagtgccgctattgtaacgttctgtgtggtgagcgtgaggaagaagctcgagcatgccatgctactcacaatcgtgcttgccggtgtagaaccggtttttttgcccatgcaggcttctgcctggaacatgcaagctgtccccctggcgctggcgttatcgcacccggaactcctagccagaatacacaatgtcagccttgccctgacggctttttctctaatgagacttcaagtaaagctccctgccgcaagcacaccaactgtagtgtgtttgggttgttgctgacccagaaggggaacgcaactcacgacaacatttgtagcgggaattcagaaagcacccaaaag

SEQ ID NO: 282 - protein, 173 aa, Artificial Sequence
  Amino acid sequence of Chimera A-E57L_R58E
ETFPPKYLHYDEETSHQLLCDKCPPGTYLKQHCTAKWKTVCAPCPPRHYTQFWNYLLECRYCNVLCGEREEEARACHATHNRACRCRTGFFAHAGFCLEHASCPPGAGVIAPGTPSQNTQCQPCPDGFFSNETSSKAPCRKHTNCSVFGLLLTQKGNATHDNICSGNSESTQK

SEQ ID NO: 283 - DNA, 519 bp, Artificial Sequence
  CDS (1)..(519)
  Nucleotide sequence of Chimera A-E57V_R58T
gagacctttccccctaagtacctccattacgacgaagaaacaagccaccaactcctctgtgacaagtgccccccagggacatatttgaaacagcactgtaccgcaaagtggaaaacagtatgcgccccttgcccaccaagacactacactcagttttggaattacctggtgacatgccgctattgtaacgttctgtgtggtgagcgtgaggaagaagctcgagcatgccatgctactcacaatcgtgcttgccggtgtagaaccggtttttttgcccatgcaggcttctgcctggaacatgcaagctgtccccctggcgctggcgttatcgcacccggaactcctagccagaatacacaatgtcagccttgccctgacggctttttctctaatgagacttcaagtaaagctccctgccgcaagcacaccaactgtagtgtgtttgggttgttgctgacccagaaggggaacgcaactcacgacaacatttgtagcgggaattcagaaagcacccaaaag

SEQ ID NO: 284 - protein, 173 aa, Artificial Sequence
  Amino acid sequence of Chimera A-E57V_R58T
ETFPPKYLHYDEETSHQLLCDKCPPGTYLKQHCTAKWKTVCAPCPPRHYTQFWNYLVTCRYCNVLCGEREEEARACHATHNRACRCRTGFFAHAGFCLEHASCPPGAGVIAPGTPSQNTQCQPCPDGFFSNETSSKAPCRKHTNCSVFGLLLTQKGNATHDNICSGNSESTQK

SEQ ID NO: 285 - DNA, 519 bp, Artificial Sequence
  CDS (1)..(519)
  Nucleotide sequence of Chimera A-E57V_R58E
gagacctttccccctaagtacctccattacgacgaagaaacaagccaccaactcctctgtgacaagtgccccccagggacatatttgaaacagcactgtaccgcaaagtggaaaacagtatgcgccccttgcccaccaagacactacactcagttttggaattacctggtggagtgccgctattgtaacgttctgtgtggtgagcgtgaggaagaagctcgagcatgccatgctactcacaatcgtgcttgccggtgtagaaccggtttttttgcccatgcaggcttctgcctggaacatgcaagctgtccccctggcgctggcgttatcgcacccggaactcctagccagaatacacaatgtcagccttgccctgacggctttttctctaatgagacttcaagtaaagctccctgccgcaagcacaccaactgtagtgtgtttgggttgttgctgacccagaaggggaacgcaactcacgacaacatttgtagcgggaattcagaaagcacccaaaag

SEQ ID NO: 286 - protein, 173 aa, Artificial Sequence
  Amino acid sequence of Chimera A-E57V_R58E
ETFPPKYLHYDEETSHQLLCDKCPPGTYLKQHCTAKWKTVCAPCPPRHYTQFWNYLVECRYCNVLCGEREEEARACHATHNRACRCRTGFFAHAGFCLEHASCPPGAGVIAPGTPSQNTQCQPCPDGFFSNETSSKAPCRKHTNCSVFGLLLTQKGNATHDNICSGNSESTQK

SEQ ID NO: 287 - DNA, 1206 bp, Artificial Sequence
  CDS (1)..(1206)
  Nucleotide sequence of Chimera A-E57A-Fc(g4PEK)
gagacctttccccctaagtacctccattacgacgaagaaacaagccaccaactcctctgtgacaagtgccccccagggacatatttgaaacagcactgtaccgcaaagtggaaaacagtatgcgccccttgcccaccaagacactacactcagttttggaattacctggccagatgccgctattgtaacgttctgtgtggtgagcgtgaggaagaagctcgagcatgccatgctactcacaatcgtgcttgccggtgtagaaccggtttttttgcccatgcaggcttctgcctggaacatgcaagctgtccccctggcgctggcgttatcgcacccggaactcctagccagaatacacaatgtcagccttgccctgacggctttttctctaatgagacttcaagtaaagctccctgccgcaagcacaccaactgtagtgtgtttgggttgttgctgacccagaaggggaacgcaactcacgacaacatttgtagcgggaattcagaaagcacccaaaaggagtccaaatatggtcccccatgcccaccatgcccagcacctgagttcgaggggggaccatcagtcttcctgttccccccaaaacccaaggacactctcatgatctcccggacccctgaggtcacgtgcgtggtggtggacgtgagccaggaagaccccgaggtccagttcaactggtacgtggatggcgtggaggtgcataatgccaagacaaagccgcgggaggagcagttcaacagcacgtaccgtgtggtcagcgtcctcaccgtcctgcaccaggactggctgaacggcaaggagtacaagtgcaaggtctccaacaaaggcctcccgtcctccatcgagaaaaccatctccaaagccaaagggcagccccgagagccacaggtgtacaccctgcccccatcccaggaggagatgaccaagaaccaggtcagcctgacctgcctggtcaaaggcttctaccccagcgacatcgccgtggagtgggagagcaatgggcagccggagaacaactacaagaccacgcctcccgtgctggactccgacggctccttcttcctctacagcaagctaaccgtggacaagagcaggtggcaggaggggaatgtcttctcatgctccgtgatgcatgaggctctgcacaaccactacacacagaagagcctctccctgtctctgggtaaa

SEQ ID NO: 288 - protein, 402 aa, Artificial Sequence
  Amino acid sequence of Chimera A-E57A-Fc(g4PEK)
ETFPPKYLHYDEETSHQLLCDKCPPGTYLKQHCTAKWKTVCAPCPPRHYTQFWNYLARCRYCNVLCGEREEEARACHATHNRACRCRTGFFAHAGFCLEHASCPPGAGVIAPGTPSQNTQCQPCPDGFFSNETSSKAPCRKHTNCSVFGLLLTQKGNATHDNICSGNSESTQKESKYGPPCPPCPAPEFEGGPSVFLFPPKPKDTLMISRTPEVTCVVVDVSQEDPEVQFNWYVDGVEVHNAKTKPREEQFNSTYRVVSVLTVLHQDWLNGKEYKCKVSNKGLPSSIEKTISKAKGQPREPQVYTLPPSQEEMTKNQVSLTCLVKGFYPSDIAVEWESNGQPENNYKTTPPVLDSDGSFFLYSKLTVDKSRWQEGNVFSCSVMHEALHNHYTQKSLSLSLGK

SEQ ID NO: 289 - DNA, 1206 bp, Artificial Sequence
  CDS (1)..(1206)
  Nucleotide sequence of Chimera A-E57F-Fc(g4PEK)
gagacctttccccctaagtacctccattacgacgaagaaacaagccaccaactcctctgtgacaagtgccccccagggacatatttgaaacagcactgtaccgcaaagtggaaaacagtatgcgccccttgcccaccaagacactacactcagttttggaattacctgttcagatgccgctattgtaacgttctgtgtggtgagcgtgaggaagaagctcgagcatgccatgctactcacaatcgtgcttgccggtgtagaaccggtttttttgcccatgcaggcttctgcctggaacatgcaagctgtccccctggcgctggcgttatcgcacccggaactcctagccagaatacacaatgtcagccttgccctgacggctttttctctaatgagacttcaagtaaagctccctgccgcaagcacaccaactgtagtgtgtttgggttgttgctgacccagaaggggaacgcaactcacgacaacatttgtagcgggaattcagaaagcacccaaaaggagtccaaatatggtcccccatgcccaccatgcccagcacctgagttcgaggggggaccatcagtcttcctgttccccccaaaacccaaggacactctcatgatctcccggacccctgaggtcacgtgcgtggtggtggacgtgagccaggaagaccccgaggtccagttcaactggtacgtggatggcgtggaggtgcataatgccaagacaaagccgcgggaggagcagttcaacagcacgtaccgtgtggtcagcgtcctcaccgtcctgcaccaggactggctgaacggcaaggagtacaagtgcaaggtctccaacaaaggcctcccgtcctccatcgagaaaaccatctccaaagccaaagggcagccccgagagccacaggtgtacaccctgcccccatcccaggaggagatgaccaagaaccaggtcagcctgacctgcctggtcaaaggcttctaccccagcgacatcgccgtggagtgggagagcaatgggcagccggagaacaactacaagaccacgcctcccgtgctggactccgacggctccttcttcctctacagcaagctaaccgtggacaagagcaggtggcaggaggggaatgtcttctcatgctccgtgatgcatgaggctctgcacaaccactacacacagaagagcctctccctgtctctgggtaaa

SEQ ID NO: 290 - protein, 402 aa, Artificial Sequence
  Amino acid sequence of Chimera A-E57F-Fc(g4PEK)
ETFPPKYLHYDEETSHQLLCDKCPPGTYLKQHCTAKWKTVCAPCPPRHYTQFWNYLFRCRYCNVLCGEREEEARACHATHNRACRCRTGFFAHAGFCLEHASCPPGAGVIAPGTPSQNTQCQPCPDGFFSNETSSKAPCRKHTNCSVFGLLLTQKGNATHDNICSGNSESTQKESKYGPPCPPCPAPEFEGGPSVFLFPPKPKDTLMISRTPEVTCVVVDVSQEDPEVQFNWYVDGVEVHNAKTKPREEQFNSTYRVVSVLTVLHQDWLNGKEYKCKVSNKGLPSSIEKTISKAKGQPREPQVYTLPPSQEEMTKNQVSLTCLVKGFYPSDIAVEWESNGQPENNYKTTPPVLDSDGSFFLYSKLTVDKSRWQEGNVFSCSVMHEALHNHYTQKSLSLSLGK

SEQ ID NO: 291 - DNA, 1206 bp, Artificial Sequence
  CDS (1)..(1206)
  Nucleotide sequence of Chimera A-E57H-Fc(g4PEK)
gagacctttccccctaagtacctccattacgacgaagaaacaagccaccaactcctctgtgacaagtgccccccagggacatatttgaaacagcactgtaccgcaaagtggaaaacagtatgcgccccttgcccaccaagacactacactcagttttggaattacctgcacagatgccgctattgtaacgttctgtgtggtgagcgtgaggaagaagctcgagcatgccatgctactcacaatcgtgcttgccggtgtagaaccggtttttttgcccatgcaggcttctgcctggaacatgcaagctgtccccctggcgctggcgttatcgcacccggaactcctagccagaatacacaatgtcagccttgccctgacggctttttctctaatgagacttcaagtaaagctccctgccgcaagcacaccaactgtagtgtgtttgggttgttgctgacccagaaggggaacgcaactcacgacaacatttgtagcgggaattcagaaagcacccaaaaggagtccaaatatggtcccccatgcccaccatgcccagcacctgagttcgaggggggaccatcagtcttcctgttccccccaaaacccaaggacactctcatgatctcccggacccctgaggtcacgtgcgtggtggtggacgtgagccaggaagaccccgaggtccagttcaactggtacgtggatggcgtggaggtgcataatgccaagacaaagccgcgggaggagcagttcaacagcacgtaccgtgtggtcagcgtcctcaccgtcctgcaccaggactggctgaacggcaaggagtacaagtgcaaggtctccaacaaaggcctcccgtcctccatcgagaaaaccatctccaaagccaaagggcagccccgagagccacaggtgtacaccctgcccccatcccaggaggagatgaccaagaaccaggtcagcctgacctgcctggtcaaaggcttctaccccagcgacatcgccgtggagtgggagagcaatgggcagccggagaacaactacaagaccacgcctcccgtgctggactccgacggctccttcttcctctacagcaagctaaccgtggacaagagcaggtggcaggaggggaatgtcttctcatgctccgtgatgcatgaggctctgcacaaccactacacacagaagagcctctccctgtctctgggtaaa

SEQ ID NO: 292 - protein, 402 aa, Artificial Sequence
  Amino acid sequence of Chimera A-E57H-Fc(g4PEK)
ETFPPKYLHYDEETSHQLLCDKCPPGTYLKQHCTAKWKTVCAPCPPRHYTQFWNYLHRCRYCNVLCGEREEEARACHATHNRACRCRTGFFAHAGFCLEHASCPPGAGVIAPGTPSQNTQCQPCPDGFFSNETSSKAPCRKHTNCSVFGLLLTQKGNATHDNICSGNSESTQKESKYGPPCPPCPAPEFEGGPSVFLFPPKPKDTLMISRTPEVTCVVVDVSQEDPEVQFNWYVDGVEVHNAKTKPREEQFNSTYRVVSVLTVLHQDWLNGKEYKCKVSNKGLPSSIEKTISKAKGQPREPQVYTLPPSQEEMTKNQVSLTCLVKGFYPSDIAVEWESNGQPENNYKTTPPVLDSDGSFFLYSKLTVDKSRWQEGNVFSCSVMHEALHNHYTQKSLSLSLGK

SEQ ID NO: 293 - DNA, 1206 bp, Artificial Sequence
  CDS (1)..(1206)
  Nucleotide sequence of Chimera A-E57I-Fc(g4PEK)
gagacctttccccctaagtacctccattacgacgaagaaacaagccaccaactcctctgtgacaagtgccccccagggacatatttgaaacagcactgtaccgcaaagtggaaaacagtatgcgccccttgcccaccaagacactacactcagttttggaattacctgatcagatgccgctattgtaacgttctgtgtggtgagcgtgaggaagaagctcgagcatgccatgctactcacaatcgtgcttgccggtgtagaaccggtttttttgcccatgcaggcttctgcctggaacatgcaagctgtccccctggcgctggcgttatcgcacccggaactcctagccagaatacacaatgtcagccttgccctgacggctttttctctaatgagacttcaagtaaagctccctgccgcaagcacaccaactgtagtgtgtttgggttgttgctgacccagaaggggaacgcaactcacgacaacatttgtagcgggaattcagaaagcacccaaaaggagtccaaatatggtcccccatgcccaccatgcccagcacctgagttcgaggggggaccatcagtcttcctgttccccccaaaacccaaggacactctcatgatctcccggacccctgaggtcacgtgcgtggtggtggacgtgagccaggaagaccccgaggtccagttcaactggtacgtggatggcgtggaggtgcataatgccaagacaaagccgcgggaggagcagttcaacagcacgtaccgtgtggtcagcgtcctcaccgtcctgcaccaggactggctgaacggcaaggagtacaagtgcaaggtctccaacaaaggcctcccgtcctccatcgagaaaaccatctccaaagccaaagggcagccccgagagccacaggtgtacaccctgcccccatcccaggaggagatgaccaagaaccaggtcagcctgacctgcctggtcaaaggcttctaccccagcgacatcgccgtggagtgggagagcaatgggcagccggagaacaactacaagaccacgcctcccgtgctggactccgacggctccttcttcctctacagcaagctaaccgtggacaagagcaggtggcaggaggggaatgtcttctcatgctccgtgatgcatgaggctctgcacaaccactacacacagaagagcctctccctgtctctgggtaaa

SEQ ID NO: 294 - protein, 402 aa, Artificial Sequence
  Amino acid sequence of Chimera A-E57I-Fc(g4PEK)
ETFPPKYLHYDEETSHQLLCDKCPPGTYLKQHCTAKWKTVCAPCPPRHYTQFWNYLIRCRYCNVLCGEREEEARACHATHNRACRCRTGFFAHAGFCLEHASCPPGAGVIAPGTPSQNTQCQPCPDGFFSNETSSKAPCRKHTNCSVFGLLLTQKGNATHDNICSGNSESTQKESKYGPPCPPCPAPEFEGGPSVFLFPPKPKDTLMISRTPEVTCVVVDVSQEDPEVQFNWYVDGVEVHNAKTKPREEQFNSTYRVVSVLTVLHQDWLNGKEYKCKVSNKGLPSSIEKTISKAKGQPREPQVYTLPPSQEEMTKNQVSLTCLVKGFYPSDIAVEWESNGQPENNYKTTPPVLDSDGSFFLYSKLTVDKSRWQEGNVFSCSVMHEALHNHYTQKSLSLSLGK

SEQ ID NO: 295 - DNA, 1206 bp, Artificial Sequence
  CDS (1)..(1206)
  Nucleotide sequence of Chimera A-E57M-Fc(g4PEK)
gagacctttccccctaagtacctccattacgacgaagaaacaagccaccaactcctctgtgacaagtgccccccagggacatatttgaaacagcactgtaccgcaaagtggaaaacagtatgcgccccttgcccaccaagacactacactcagttttggaattacctgatgagatgccgctattgtaacgttctgtgtggtgagcgtgaggaagaagctcgagcatgccatgctactcacaatcgtgcttgccggtgtagaaccggtttttttgcccatgcaggcttctgcctggaacatgcaagctgtccccctggcgctggcgttatcgcacccggaactcctagccagaatacacaatgtcagccttgccctgacggctttttctctaatgagacttcaagtaaagctccctgccgcaagcacaccaactgtagtgtgtttgggttgttgctgacccagaaggggaacgcaactcacgacaacatttgtagcgggaattcagaaagcacccaaaaggagtccaaatatggtcccccatgcccaccatgcccagcacctgagttcgaggggggaccatcagtcttcctgttccccccaaaacccaaggacactctcatgatctcccggacccctgaggtcacgtgcgtggtggtggacgtgagccaggaagaccccgaggtccagttcaactggtacgtggatggcgtggaggtgcataatgccaagacaaagccgcgggaggagcagttcaacagcacgtaccgtgtggtcagcgtcctcaccgtcctgcaccaggactggctgaacggcaaggagtacaagtgcaaggtctccaacaaaggcctcccgtcctccatcgagaaaaccatctccaaagccaaagggcagccccgagagccacaggtgtacaccctgcccccatcccaggaggagatgaccaagaaccaggtcagcctgacctgcctggtcaaaggcttctaccccagcgacatcgccgtggagtgggagagcaatgggcagccggagaacaactacaagaccacgcctcccgtgctggactccgacggctccttcttcctctacagcaagctaaccgtggacaagagcaggtggcaggaggggaatgtcttctcatgctccgtgatgcatgaggctctgcacaaccactacacacagaagagcctctccctgtctctgggtaaa

SEQ ID NO: 296 - protein, 402 aa, Artificial Sequence
  Amino acid sequence of Chimera A-E57M-Fc(g4PEK)
ETFPPKYLHYDEETSHQLLCDKCPPGTYLKQHCTAKWKTVCAPCPPRHYTQFWNYLMRCRYCNVLCGEREEEARACHATHNRACRCRTGFFAHAGFCLEHASCPPGAGVIAPGTPSQNTQCQPCPDGFFSNETSSKAPCRKHTNCSVFGLLLTQKGNATHDNICSGNSESTQKESKYGPPCPPCPAPEFEGGPSVFLFPPKPKDTLMISRTPEVTCVVVDVSQEDPEVQFNWYVDGVEVHNAKTKPREEQFNSTYRVVSVLTVLHQDWLNGKEYKCKVSNKGLPSSIEKTISKAKGQPREPQVYTLPPSQEEMTKNQVSLTCLVKGFYPSDIAVEWESNGQPENNYKTTPPVLDSDGSFFLYSKLTVDKSRWQEGNVFSCSVMHEALHNHYTQKSLSLSLGK

SEQ ID NO: 297 - DNA, 1206 bp, Artificial Sequence
  CDS (1)..(1206)
  Nucleotide sequence of Chimera A-E57K_R58T-Fc(g4PEK)
gagacctttccccctaagtacctccattacgacgaagaaacaagccaccaactcctctgtgacaagtgccccccagggacatatttgaaacagcactgtaccgcaaagtggaaaacagtatgcgccccttgcccaccaagacactacactcagttttggaattacctgaagacatgccgctattgtaacgttctgtgtggtgagcgtgaggaagaagctcgagcatgccatgctactcacaatcgtgcttgccggtgtagaaccggtttttttgcccatgcaggcttctgcctggaacatgcaagctgtccccctggcgctggcgttatcgcacccggaactcctagccagaatacacaatgtcagccttgccctgacggctttttctctaatgagacttcaagtaaagctccctgccgcaagcacaccaactgtagtgtgtttgggttgttgctgacccagaaggggaacgcaactcacgacaacatttgtagcgggaattcagaaagcacccaaaaggagtccaaatatggtcccccatgcccaccatgcccagcacctgagttcgaggggggaccatcagtcttcctgttccccccaaaacccaaggacactctcatgatctcccggacccctgaggtcacgtgcgtggtggtggacgtgagccaggaagaccccgaggtccagttcaactggtacgtggatggcgtggaggtgcataatgccaagacaaagccgcgggaggagcagttcaacagcacgtaccgtgtggtcagcgtcctcaccgtcctgcaccaggactggctgaacggcaaggagtacaagtgcaaggtctccaacaaaggcctcccgtcctccatcgagaaaaccatctccaaagccaaagggcagccccgagagccacaggtgtacaccctgcccccatcccaggaggagatgaccaagaaccaggtcagcctgacctgcctggtcaaaggcttctaccccagcgacatcgccgtggagtgggagagcaatgggcagccggagaacaactacaagaccacgcctcccgtgctggactccgacggctccttcttcctctacagcaagctaaccgtggacaagagcaggtggcaggaggggaatgtcttctcatgctccgtgatgcatgaggctctgcacaaccactacacacagaagagcctctccctgtctctgggtaaa

SEQ ID NO: 298 - protein, 402 aa, Artificial Sequence
  Amino acid sequence of Chimera A-E57K_R58T-Fc(g4PEK)
ETFPPKYLHYDEETSHQLLCDKCPPGTYLKQHCTAKWKTVCAPCPPRHYTQFWNYLKTCRYCNVLCGEREEEARACHATHNRACRCRTGFFAHAGFCLEHASCPPGAGVIAPGTPSQNTQCQPCPDGFFSNETSSKAPCRKHTNCSVFGLLLTQKGNATHDNICSGNSESTQKESKYGPPCPPCPAPEFEGGPSVFLFPPKPKDTLMISRTPEVTCVVVDVSQEDPEVQFNWYVDGVEVHNAKTKPREEQFNSTYRVVSVLTVLHQDWLNGKEYKCKVSNKGLPSSIEKTISKAKGQPREPQVYTLPPSQEEMTKNQVSLTCLVKGFYPSDIAVEWESNGQPENNYKTTPPVLDSDGSFFLYSKLTVDKSRWQEGNVFSCSVMHEALHNHYTQKSLSLSLGK

SEQ ID NO: 299 - DNA, 1206 bp, Artificial Sequence
  CDS (1)..(1206)
  Nucleotide sequence of Chimera A-E57L_R58E-Fc(g4PEK)
gagacctttccccctaagtacctccattacgacgaagaaacaagccaccaactcctctgtgacaagtgccccccagggacatatttgaaacagcactgtaccgcaaagtggaaaacagtatgcgccccttgcccaccaagacactacactcagttttggaattacctgctggagtgccgctattgtaacgttctgtgtggtgagcgtgaggaagaagctcgagcatgccatgctactcacaatcgtgcttgccggtgtagaaccggtttttttgcccatgcaggcttctgcctggaacatgcaagctgtccccctggcgctggcgttatcgcacccggaactcctagccagaatacacaatgtcagccttgccctgacggctttttctctaatgagacttcaagtaaagctccctgccgcaagcacaccaactgtagtgtgtttgggttgttgctgacccagaaggggaacgcaactcacgacaacatttgtagcgggaattcagaaagcacccaaaaggagtccaaatatggtcccccatgcccaccatgcccagcacctgagttcgaggggggaccatcagtcttcctgttccccccaaaacccaaggacactctcatgatctcccggacccctgaggtcacgtgcgtggtggtggacgtgagccaggaagaccccgaggtccagttcaactggtacgtggatggcgtggaggtgcataatgccaagacaaagccgcgggaggagcagttcaacagcacgtaccgtgtggtcagcgtcctcaccgtcctgcaccaggactggctgaacggcaaggagtacaagtgcaaggtctccaacaaaggcctcccgtcctccatcgagaaaaccatctccaaagccaaagggcagccccgagagccacaggtgtacaccctgcccccatcccaggaggagatgaccaagaaccaggtcagcctgacctgcctggtcaaaggcttctaccccagcgacatcgccgtggagtgggagagcaatgggcagccggagaacaactacaagaccacgcctcccgtgctggactccgacggctccttcttcctctacagcaagctaaccgtggacaagagcaggtggcaggaggggaatgtcttctcatgctccgtgatgcatgaggctctgcacaaccactacacacagaagagcctctccctgtctctgggtaaa

SEQ ID NO: 300 - protein, 402 aa, Artificial Sequence
  Amino acid sequence of Chimera A-E57L_R58E-Fc(g4PEK)
ETFPPKYLHYDEETSHQLLCDKCPPGTYLKQHCTAKWKTVCAPCPPRHYTQFWNYLLECRYCNVLCGEREEEARACHATHNRACRCRTGFFAHAGFCLEHASCPPGAGVIAPGTPSQNTQCQPCPDGFFSNETSSKAPCRKHTNCSVFGLLLTQKGNATHDNICSGNSESTQKESKYGPPCPPCPAPEFEGGPSVFLFPPKPKDTLMISRTPEVTCVVVDVSQEDPEVQFNWYVDGVEVHNAKTKPREEQFNSTYRVVSVLTVLHQDWLNGKEYKCKVSNKGLPSSIEKTISKAKGQPREPQVYTLPPSQEEMTKNQVSLTCLVKGFYPSDIAVEWESNGQPENNYKTTPPVLDSDGSFFLYSKLTVDKSRWQEGNVFSCSVMHEALHNHYTQKSLSLSLGK

SEQ ID NO: 301 - DNA, 1206 bp, Artificial Sequence
  CDS (1)..(1206)
  Nucleotide sequence of Chimera A-E57V_R58T-Fc(g4PEK)
gagacctttccccctaagtacctccattacgacgaagaaacaagccaccaactcctctgtgacaagtgccccccagggacatatttgaaacagcactgtaccgcaaagtggaaaacagtatgcgccccttgcccaccaagacactacactcagttttggaattacctggtgacatgccgctattgtaacgttctgtgtggtgagcgtgaggaagaagctcgagcatgccatgctactcacaatcgtgcttgccggtgtagaaccggtttttttgcccatgcaggcttctgcctggaacatgcaagctgtccccctggcgctggcgttatcgcacccggaactcctagccagaatacacaatgtcagccttgccctgacggctttttctctaatgagacttcaagtaaagctccctgccgcaagcacaccaactgtagtgtgtttgggttgttgctgacccagaaggggaacgcaactcacgacaacatttgtagcgggaattcagaaagcacccaaaaggagtccaaatatggtcccccatgcccaccatgcccagcacctgagttcgaggggggaccatcagtcttcctgttccccccaaaacccaaggacactctcatgatctcccggacccctgaggtcacgtgcgtggtggtggacgtgagccaggaagaccccgaggtccagttcaactggtacgtggatggcgtggaggtgcataatgccaagacaaagccgcgggaggagcagttcaacagcacgtaccgtgtggtcagcgtcctcaccgtcctgcaccaggactggctgaacggcaaggagtacaagtgcaaggtctccaacaaaggcctcccgtcctccatcgagaaaaccatctccaaagccaaagggcagccccgagagccacaggtgtacaccctgcccccatcccaggaggagatgaccaagaaccaggtcagcctgacctgcctggtcaaaggcttctaccccagcgacatcgccgtggagtgggagagcaatgggcagccggagaacaactacaagaccacgcctcccgtgctggactccgacggctccttcttcctctacagcaagctaaccgtggacaagagcaggtggcaggaggggaatgtcttctcatgctccgtgatgcatgaggctctgcacaaccactacacacagaagagcctctccctgtctctgggtaaa

SEQ ID NO: 302 - protein, 402 aa, Artificial Sequence
  Amino acid sequence of Chimera A-E57V_R58T-Fc(g4PEK)
ETFPPKYLHYDEETSHQLLCDKCPPGTYLKQHCTAKWKTVCAPCPPRHYTQFWNYLVTCRYCNVLCGEREEEARACHATHNRACRCRTGFFAHAGFCLEHASCPPGAGVIAPGTPSQNTQCQPCPDGFFSNETSSKAPCRKHTNCSVFGLLLTQKGNATHDNICSGNSESTQKESKYGPPCPPCPAPEFEGGPSVFLFPPKPKDTLMISRTPEVTCVVVDVSQEDPEVQFNWYVDGVEVHNAKTKPREEQFNSTYRVVSVLTVLHQDWLNGKEYKCKVSNKGLPSSIEKTISKAKGQPREPQVYTLPPSQEEMTKNQVSLTCLVKGFYPSDIAVEWESNGQPENNYKTTPPVLDSDGSFFLYSKLTVDKSRWQEGNVFSCSVMHEALHNHYTQKSLSLSLGK

SEQ ID NO: 303 - DNA, 1206 bp, Artificial Sequence
  CDS (1)..(1206)
  Nucleotide sequence of Chimera A-E57V_R58E-Fc(g4PEK)
gagacctttccccctaagtacctccattacgacgaagaaacaagccaccaactcctctgtgacaagtgccccccagggacatatttgaaacagcactgtaccgcaaagtggaaaacagtatgcgccccttgcccaccaagacactacactcagttttggaattacctggtggagtgccgctattgtaacgttctgtgtggtgagcgtgaggaagaagctcgagcatgccatgctactcacaatcgtgcttgccggtgtagaaccggtttttttgcccatgcaggcttctgcctggaacatgcaagctgtccccctggcgctggcgttatcgcacccggaactcctagccagaatacacaatgtcagccttgccctgacggctttttctctaatgagacttcaagtaaagctccctgccgcaagcacaccaactgtagtgtgtttgggttgttgctgacccagaaggggaacgcaactcacgacaacatttgtagcgggaattcagaaagcacccaaaaggagtccaaatatggtcccccatgcccaccatgcccagcacctgagttcgaggggggaccatcagtcttcctgttccccccaaaacccaaggacactctcatgatctcccggacccctgaggtcacgtgcgtggtggtggacgtgagccaggaagaccccgaggtccagttcaactggtacgtggatggcgtggaggtgcataatgccaagacaaagccgcgggaggagcagttcaacagcacgtaccgtgtggtcagcgtcctcaccgtcctgcaccaggactggctgaacggcaaggagtacaagtgcaaggtctccaacaaaggcctcccgtcctccatcgagaaaaccatctccaaagccaaagggcagccccgagagccacaggtgtacaccctgcccccatcccaggaggagatgaccaagaaccaggtcagcctgacctgcctggtcaaaggcttctaccccagcgacatcgccgtggagtgggagagcaatgggcagccggagaacaactacaagaccacgcctcccgtgctggactccgacggctccttcttcctctacagcaagctaaccgtggacaagagcaggtggcaggaggggaatgtcttctcatgctccgtgatgcatgaggctctgcacaaccactacacacagaagagcctctccctgtctctgggtaaa

SEQ ID NO: 304 - protein, 402 aa, Artificial Sequence
  Amino acid sequence of Chimera A-E57V_R58E-Fc(g4PEK)
ETFPPKYLHYDEETSHQLLCDKCPPGTYLKQHCTAKWKTVCAPCPPRHYTQFWNYLVECRYCNVLCGEREEEARACHATHNRACRCRTGFFAHAGFCLEHASCPPGAGVIAPGTPSQNTQCQPCPDGFFSNETSSKAPCRKHTNCSVFGLLLTQKGNATHDNICSGNSESTQKESKYGPPCPPCPAPEFEGGPSVFLFPPKPKDTLMISRTPEVTCVVVDVSQEDPEVQFNWYVDGVEVHNAKTKPREEQFNSTYRVVSVLTVLHQDWLNGKEYKCKVSNKGLPSSIEKTISKAKGQPREPQVYTLPPSQEEMTKNQVSLTCLVKGFYPSDIAVEWESNGQPENNYKTTPPVLDSDGSFFLYSKLTVDKSRWQEGNVFSCSVMHEALHNHYTQKSLSLSLGK

SEQ ID NO: 305 - DNA, 528 bp, Homo sapiens
  CDS (1)..(528)
  Nucleotide sequence of soluble recombinant of LIGHT with FLAG tag
gactacaaagacgatgacgacaagcttgacggacctgcaggctcctgggagcagctgatacaagagcgaaggtctcacgaggtcaacccagcagcgcatctcacaggggccaactccagcttgaccggcagcggggggccgctgttatgggagactcagctgggcctggccttcctgaggggcctcagctaccacgatggggcccttgtggtcaccaaagctggctactactacatctactccaaggtgcagctgggcggtgtgggctgcccgctgggcctggccagcaccatcacccacggcctctacaagcgcacaccccgctaccccgaggagctggagctgttggtcagccagcagtcaccctgcggacgggccaccagcagctcccgggtctggtgggacagcagcttcctgggtggtgtggtacacctggaggctggggagaaggtggtcgtccgtgtgctggatgaacgcctggttcgactgcgtgatggtacccggtcttacttcggggctttcatggtg

SEQ ID NO: 306 - protein, 176 aa, Homo sapiens
  Amino acid sequence of soluble recombinant of LIGHT with FLAG tag
DYKDDDDKLDGPAGSWEQLIQERRSHEVNPAAHLTGANSSLTGSGGPLLWETQLGLAFLRGLSYHDGALVVTKAGYYYIYSKVQLGGVGCPLGLASTITHGLYKRTPRYPEELELLVSQQSPCGRATSSSRVWWDSSFLGGVVHLEAGEKVVVRVLDERLVRLRDGTRSYFGAFMV

SEQ ID NO: 307 - DNA, 777 bp, Homo sapiens
  CDS (1)..(777)
  Nucleotide sequence of TL1A wherein FLAG tag has been inserted into N-terminus thereof
atggactacaaggacgacgatgacaaggccgaggatctgggactgagctttggggaaacagccagtgtggaaatgctgccagagcacggcagctgcaggcccaaggccaggagcagcagcgcacgctgggctctcacctgctgcctggtgttgctccccttccttgcaggactcaccacatacctgcttgtcagccagctccgggcccagggagaggcctgtgtgcagttccaggctctaaaaggacaggagtttgcaccttcacatcagcaagtttatgcacctcttagagcagacggagataagccaagggcacacctgacagttgtgagacaaactcccacacagcactttaaaaatcagttcccagctctgcactgggaacatgaactaggcctggccttcaccaagaaccgaatgaactataccaacaaattcctgctgatcccagagtcgggagactacttcatttactcccaggtcacattccgtgggatgacctctgagtgcagtgaaatcagacaagcaggccgaccaaacaagccagactccatcactgtggtcatcaccaaggtaacagacagctaccctgagccaacccagctcctcatggggaccaagtctgtatgcgaagtaggtagcaactggttccagcccatctacctcggagccatgttctccttgcaagaaggggacaagctaatggtgaacgtcagtgacatctctttggtggattacacaaaagaagataaaaccttctttggagccttcttacta

SEQ ID NO: 308 - protein, 259 aa, Homo sapiens
  Amino acid sequence of TL1A wherein FLAG tag has been inserted into N-terminus thereof
MDYKDDDDKAEDLGLSFGETASVEMLPEHGSCRPKARSSSARWALTCCLVLLPFLAGLTTYLLVSQLRAQGEACVQFQALKGQEFAPSHQQVYAPLRADGDKPRAHLTVVRQTPTQHFKNQFPALHWEHELGLAFTKNRMNYTNKFLLIPESGDYFIYSQVTFRGMTSECSEIRQAGRPNKPDSITVVITKVTDSYPEPTQLLMGTKSVCEVGSNWFQPIYLGAMFSLQEGDKLMVNVSDISLVDYTKEDKTFFGAFLL

SEQ ID NO: 309 - DNA, 867 bp, Homo sapiens
  CDS (1)..(867)
  Nucleotide sequence of FasL wherein FLAG tag has been inserted into N-terminus thereof
atggactacaaggacgacgatgacaagcagcagcccttcaattacccatatccccagatctactgggtggacagcagtgccagctctccctgggcccctccaggcacagttcttccctgtccaacctctgtgcccagaaggcctggtcaaaggaggccaccaccaccaccgccaccgccaccactaccacctccgccgccgccgccaccactgcctccactaccgctgccacccctgaagaagagagggaaccacagcacaggcctgtgtctccttgtgatgtttttcatggttctggttgccttggtaggattgggcctggggatgtttcagctcttccacctacagaaggagctggcagaactccgagagtctaccagccagatgcacacagcatcatctttggagaagcaaataggccaccccagtccaccccctgaaaaaaaggagctgaggaaagtggcccatttaacaggcaagtccaactcaaggtccatgcctctggaatgggaagacacctatggaattgtcctgctttctggagtgaagtataagaagggtggccttgtgatcaatgaaactgggctgtactttgtatattccaaagtatacttccggggtcaatcttgcaacaacctgcccctgagccacaaggtctacatgaggaactctaagtatccccaggatctggtgatgatggaggggaagatgatgagctactgcactactgggcagatgtgggcccgcagcagctacctgggggcagtgttcaatcttaccagtgctgatcatttatatgtcaacgtatctgagctctctctggtcaattttgaggaatctcagacgtttttcggcttatataagctc

SEQ ID NO: 310 - protein, 289 aa, Homo sapiens
  Amino acid sequence of FasL wherein FLAG tag has been inserted into N-terminus thereof
MDYKDDDDKQQPFNYPYPQIYWVDSSASSPWAPPGTVLPCPTSVPRRPGQRRPPPPPPPPPLPPPPPPPPLPPLPLPPLKKRGNHSTGLCLLVMFFMVLVALVGLGLGMFQLFHLQKELAELRESTSQMHTASSLEKQIGHPSPPPEKKELRKVAHLTGKSNSRSMPLEWEDTYGIVLLSGVKYKKGGLVINETGLYFVYSKVYFRGQSCNNLPLSHKVYMRNSKYPQDLVMMEGKMMSYCTTGQMWARSSYLGAVFNLTSADHLYVNVSELSLVNFEESQTFFGLYKL

SEQ ID NO: 311 - protein, 231 aa, Artificial Sequence
  Amino acid sequence of Fc(g1S YTE)
PKSSDKTHTCPPCPAPELLGGPSVFLFPPKPKDTLYITREPEVTCVVVDVSHEDPEVKFNWYVDGVEVHNAKTKPREEQYNSTYRVVSVLTVLHQDWLNGKEYKCKVSNKALPAPIEKTISKAKGQPREPQVYTLPPSRDELTKNQVSLTCLVKGFYPSDIAVEWESNGQPENNYKTTPPVLDSDGSFFLYSKLTVDKSRWQQGNVFSCSVMHEALHNHYTQKSLSLSPGK

SEQ ID NO: 312 - protein, 231 aa, Artificial Sequence
  Amino acid sequence of Fc(g1S N434A)
PKSSDKTHTCPPCPAPELLGGPSVFLFPPKPKDTLMISRTPEVTCVVVDVSHEDPEVKFNWYVDGVEVHNAKTKPREEQYNSTYRVVSVLTVLHQDWLNGKEYKCKVSNKALPAPIEKTISKAKGQPREPQVYTLPPSRDELTKNQVSLTCLVKGFYPSDIAVEWESNGQPENNYKTTPPVLDSDGSFFLYSKLTVDKSRWQQGNVFSCSVMHEALHAHYTQKSLSLSPGK

SEQ ID NO: 313 - protein, 231 aa, Artificial Sequence
  Amino acid sequence of Fc(g1S LALAGANA)
PKSSDKTHTCPPCPAPEAAGAPSVFLFPPKPKDTLMISRTPEVTCVVVDVSHEDPEVKFNWYVDGVEVHNAKTKPREEQYNSTYRVVSVLTVLHQDWLNGKEYKCKVSNKALPAPIEKTISKAKGQPREPQVYTLPPSRDELTKNQVSLTCLVKGFYPSDIAVEWESNGQPENNYKTTPPVLDSDGSFFLYSKLTVDKSRWQQGNVFSCSVMHEALHAHYTQKSLSLSPGK

SEQ ID NO: 314 - protein, 404 aa, Artificial Sequence
  Amino acid sequence of Chimera A-Fc(g1S YTE)
ETFPPKYLHYDEETSHQLLCDKCPPGTYLKQHCTAKWKTVCAPCPPRHYTQFWNYLERCRYCNVLCGEREEEARACHATHNRACRCRTGFFAHAGFCLEHASCPPGAGVIAPGTPSQNTQCQPCPDGFFSNETSSKAPCRKHTNCSVFGLLLTQKGNATHDNICSGNSESTQKPKSSDKTHTCPPCPAPELLGGPSVFLFPPKPKDTLYITREPEVTCVVVDVSHEDPEVKFNWYVDGVEVHNAKTKPREEQYNSTYRVVSVLTVLHQDWLNGKEYKCKVSNKALPAPIEKTISKAKGQPREPQVYTLPPSRDELTKNQVSLTCLVKGFYPSDIAVEWESNGQPENNYKTTPPVLDSDGSFFLYSKLTVDKSRWQQGNVFSCSVMHEALHNHYTQKSLSLSPGK

SEQ ID NO: 315 - protein, 404 aa, Artificial Sequence
  Amino acid sequence of Chimera A-Fc(g1S N434A)
ETFPPKYLHYDEETSHQLLCDKCPPGTYLKQHCTAKWKTVCAPCPPRHYTQFWNYLERCRYCNVLCGEREEEARACHATHNRACRCRTGFFAHAGFCLEHASCPPGAGVIAPGTPSQNTQCQPCPDGFFSNETSSKAPCRKHTNCSVFGLLLTQKGNATHDNICSGNSESTQKPKSSDKTHTCPPCPAPELLGGPSVFLFPPKPKDTLMISRTPEVTCVVVDVSHEDPEVKFNWYVDGVEVHNAKTKPREEQYNSTYRVVSVLTVLHQDWLNGKEYKCKVSNKALPAPIEKTISKAKGQPREPQVYTLPPSRDELTKNQVSLTCLVKGFYPSDIAVEWESNGQPENNYKTTPPVLDSDGSFFLYSKLTVDKSRWQQGNVFSCSVMHEALHAHYTQKSLSLSPGK

SEQ ID NO: 316 - protein, 404 aa, Artificial Sequence
  Amino acid sequence of Chimera A-Fc(g1S LALAGANA)
ETFPPKYLHYDEETSHQLLCDKCPPGTYLKQHCTAKWKTVCAPCPPRHYTQFWNYLERCRYCNVLCGEREEEARACHATHNRACRCRTGFFAHAGFCLEHASCPPGAGVIAPGTPSQNTQCQPCPDGFFSNETSSKAPCRKHTNCSVFGLLLTQKGNATHDNICSGNSESTQKPKSSDKTHTCPPCPAPEAAGAPSVFLFPPKPKDTLMISRTPEVTCVVVDVSHEDPEVKFNWYVDGVEVHNAKTKPREEQYNSTYRVVSVLTVLHQDWLNGKEYKCKVSNKALPAPIEKTISKAKGQPREPQVYTLPPSRDELTKNQVSLTCLVKGFYPSDIAVEWESNGQPENNYKTTPPVLDSDGSFFLYSKLTVDKSRWQQGNVFSCSVMHEALHAHYTQKSLSLSPGK

SEQ ID NO: 317 - protein, 404 aa, Artificial Sequence
  Amino acid sequence of Chimera A-E57K-Fc(g1S YTE)
ETFPPKYLHYDEETSHQLLCDKCPPGTYLKQHCTAKWKTVCAPCPPRHYTQFWNYLKRCRYCNVLCGEREEEARACHATHNRACRCRTGFFAHAGFCLEHASCPPGAGVIAPGTPSQNTQCQPCPDGFFSNETSSKAPCRKHTNCSVFGLLLTQKGNATHDNICSGNSESTQKPKSSDKTHTCPPCPAPELLGGPSVFLFPPKPKDTLYITREPEVTCVVVDVSHEDPEVKFNWYVDGVEVHNAKTKPREEQYNSTYRVVSVLTVLHQDWLNGKEYKCKVSNKALPAPIEKTISKAKGQPREPQVYTLPPSRDELTKNQVSLTCLVKGFYPSDIAVEWESNGQPENNYKTTPPVLDSDGSFFLYSKLTVDKSRWQQGNVFSCSVMHEALHNHYTQKSLSLSPGK

SEQ ID NO: 318 - protein, 404 aa, Artificial Sequence
  Amino acid sequence of Chimera A-E57L-Fc(g1S YTE)
ETFPPKYLHYDEETSHQLLCDKCPPGTYLKQHCTAKWKTVCAPCPPRHYTQFWNYLLRCRYCNVLCGEREEEARACHATHNRACRCRTGFFAHAGFCLEHASCPPGAGVIAPGTPSQNTQCQPCPDGFFSNETSSKAPCRKHTNCSVFGLLLTQKGNATHDNICSGNSESTQKPKSSDKTHTCPPCPAPELLGGPSVFLFPPKPKDTLYITREPEVTCVVVDVSHEDPEVKFNWYVDGVEVHNAKTKPREEQYNSTYRVVSVLTVLHQDWLNGKEYKCKVSNKALPAPIEKTISKAKGQPREPQVYTLPPSRDELTKNQVSLTCLVKGFYPSDIAVEWESNGQPENNYKTTPPVLDSDGSFFLYSKLTVDKSRWQQGNVFSCSVMHEALHNHYTQKSLSLSPGK

SEQ ID NO: 319 - protein, 404 aa, Artificial Sequence
  Amino acid sequence of Chimera A-E57R-Fc(g1S YTE)
ETFPPKYLHYDEETSHQLLCDKCPPGTYLKQHCTAKWKTVCAPCPPRHYTQFWNYLRRCRYCNVLCGEREEEARACHATHNRACRCRTGFFAHAGFCLEHASCPPGAGVIAPGTPSQNTQCQPCPDGFFSNETSSKAPCRKHTNCSVFGLLLTQKGNATHDNICSGNSESTQKPKSSDKTHTCPPCPAPELLGGPSVFLFPPKPKDTLYITREPEVTCVVVDVSHEDPEVKFNWYVDGVEVHNAKTKPREEQYNSTYRVVSVLTVLHQDWLNGKEYKCKVSNKALPAPIEKTISKAKGQPREPQVYTLPPSRDELTKNQVSLTCLVKGFYPSDIAVEWESNGQPENNYKTTPPVLDSDGSFFLYSKLTVDKSRWQQGNVFSCSVMHEALHNHYTQKSLSLSPGK

SEQ ID NO: 320 - protein, 404 aa, Artificial Sequence
  Amino acid sequence of Chimera A-E57V-Fc(g1S YTE)
ETFPPKYLHYDEETSHQLLCDKCPPGTYLKQHCTAKWKTVCAPCPPRHYTQFWNYLVRCRYCNVLCGEREEEARACHATHNRACRCRTGFFAHAGFCLEHASCPPGAGVIAPGTPSQNTQCQPCPDGFFSNETSSKAPCRKHTNCSVFGLLLTQKGNATHDNICSGNSESTQKPKSSDKTHTCPPCPAPELLGGPSVFLFPPKPKDTLYITREPEVTCVVVDVSHEDPEVKFNWYVDGVEVHNAKTKPREEQYNSTYRVVSVLTVLHQDWLNGKEYKCKVSNKALPAPIEKTISKAKGQPREPQVYTLPPSRDELTKNQVSLTCLVKGFYPSDIAVEWESNGQPENNYKTTPPVLDSDGSFFLYSKLTVDKSRWQQGNVFSCSVMHEALHNHYTQKSLSLSPGK

SEQ ID NO: 321 - protein, 404 aa, Artificial Sequence
  Amino acid sequence of Chimera A-E57K_R58D-Fc(g1S YTE)
ETFPPKYLHYDEETSHQLLCDKCPPGTYLKQHCTAKWKTVCAPCPPRHYTQFWNYLKDCRYCNVLCGEREEEARACHATHNRACRCRTGFFAHAGFCLEHASCPPGAGVIAPGTPSQNTQCQPCPDGFFSNETSSKAPCRKHTNCSVFGLLLTQKGNATHDNICSGNSESTQKPKSSDKTHTCPPCPAPELLGGPSVFLFPPKPKDTLYITREPEVTCVVVDVSHEDPEVKFNWYVDGVEVHNAKTKPREEQYNSTYRVVSVLTVLHQDWLNGKEYKCKVSNKALPAPIEKTISKAKGQPREPQVYTLPPSRDELTKNQVSLTCLVKGFYPSDIAVEWESNGQPENNYKTTPPVLDSDGSFFLYSKLTVDKSRWQQGNVFSCSVMHEALHNHYTQKSLSLSPGK

SEQ ID NO: 322 - protein, 404 aa, Artificial Sequence
  Amino acid sequence of Chimera A-E57K_R58E-Fc(g1S YTE)
ETFPPKYLHYDEETSHQLLCDKCPPGTYLKQHCTAKWKTVCAPCPPRHYTQFWNYLKECRYCNVLCGEREEEARACHATHNRACRCRTGFFAHAGFCLEHASCPPGAGVIAPGTPSQNTQCQPCPDGFFSNETSSKAPCRKHTNCSVFGLLLTQKGNATHDNICSGNSESTQKPKSSDKTHTCPPCPAPELLGGPSVFLFPPKPKDTLYITREPEVTCVVVDVSHEDPEVKFNWYVDGVEVHNAKTKPREEQYNSTYRVVSVLTVLHQDWLNGKEYKCKVSNKALPAPIEKTISKAKGQPREPQVYTLPPSRDELTKNQVSLTCLVKGFYPSDIAVEWESNGQPENNYKTTPPVLDSDGSFFLYSKLTVDKSRWQQGNVFSCSVMHEALHNHYTQKSLSLSPGK

SEQ ID NO: 323 - protein, 404 aa, Artificial Sequence
  Amino acid sequence of Chimera A-E57R_R58D-Fc(g1S YTE)
ETFPPKYLHYDEETSHQLLCDKCPPGTYLKQHCTAKWKTVCAPCPPRHYTQFWNYLRDCRYCNVLCGEREEEARACHATHNRACRCRTGFFAHAGFCLEHASCPPGAGVIAPGTPSQNTQCQPCPDGFFSNETSSKAPCRKHTNCSVFGLLLTQKGNATHDNICSGNSESTQKPKSSDKTHTCPPCPAPELLGGPSVFLFPPKPKDTLYITREPEVTCVVVDVSHEDPEVKFNWYVDGVEVHNAKTKPREEQYNSTYRVVSVLTVLHQDWLNGKEYKCKVSNKALPAPIEKTISKAKGQPREPQVYTLPPSRDELTKNQVSLTCLVKGFYPSDIAVEWESNGQPENNYKTTPPVLDSDGSFFLYSKLTVDKSRWQQGNVFSCSVMHEALHNHYTQKSLSLSPGK

SEQ ID NO: 324 - protein, 404 aa, Artificial Sequence
  Amino acid sequence of Chimera A-E57K-Fc(g1S N434A)
ETFPPKYLHYDEETSHQLLCDKCPPGTYLKQHCTAKWKTVCAPCPPRHYTQFWNYLKRCRYCNVLCGEREEEARACHATHNRACRCRTGFFAHAGFCLEHASCPPGAGVIAPGTPSQNTQCQPCPDGFFSNETSSKAPCRKHTNCSVFGLLLTQKGNATHDNICSGNSESTQKPKSSDKTHTCPPCPAPELLGGPSVFLFPPKPKDTLMISRTPEVTCVVVDVSHEDPEVKFNWYVDGVEVHNAKTKPREEQYNSTYRVVSVLTVLHQDWLNGKEYKCKVSNKALPAPIEKTISKAKGQPREPQVYTLPPSRDELTKNQVSLTCLVKGFYPSDIAVEWESNGQPENNYKTTPPVLDSDGSFFLYSKLTVDKSRWQQGNVFSCSVMHEALHAHYTQKSLSLSPGK

SEQ ID NO: 325 - protein, 404 aa, Artificial Sequence
  Amino acid sequence of Chimera A-E57L-Fc(g1S N434A)
ETFPPKYLHYDEETSHQLLCDKCPPGTYLKQHCTAKWKTVCAPCPPRHYTQFWNYLLRCRYCNVLCGEREEEARACHATHNRACRCRTGFFAHAGFCLEHASCPPGAGVIAPGTPSQNTQCQPCPDGFFSNETSSKAPCRKHTNCSVFGLLLTQKGNATHDNICSGNSESTQKPKSSDKTHTCPPCPAPELLGGPSVFLFPPKPKDTLMISRTPEVTCVVVDVSHEDPEVKFNWYVDGVEVHNAKTKPREEQYNSTYRVVSVLTVLHQDWLNGKEYKCKVSNKALPAPIEKTISKAKGQPREPQVYTLPPSRDELTKNQVSLTCLVKGFYPSDIAVEWESNGQPENNYKTTPPVLDSDGSFFLYSKLTVDKSRWQQGNVFSCSVMHEALHAHYTQKSLSLSPGK

SEQ ID NO: 326 - protein, 404 aa, Artificial Sequence
  Amino acid sequence of Chimera A-E57R-Fc(g1S N434A)
ETFPPKYLHYDEETSHQLLCDKCPPGTYLKQHCTAKWKTVCAPCPPRHYTQFWNYLRRCRYCNVLCGEREEEARACHATHNRACRCRTGFFAHAGFCLEHASCPPGAGVIAPGTPSQNTQCQPCPDGFFSNETSSKAPCRKHTNCSVFGLLLTQKGNATHDNICSGNSESTQKPKSSDKTHTCPPCPAPELLGGPSVFLFPPKPKDTLMISRTPEVTCVVVDVSHEDPEVKFNWYVDGVEVHNAKTKPREEQYNSTYRVVSVLTVLHQDWLNGKEYKCKVSNKALPAPIEKTISKAKGQPREPQVYTLPPSRDELTKNQVSLTCLVKGFYPSDIAVEWESNGQPENNYKTTPPVLDSDGSFFLYSKLTVDKSRWQQGNVFSCSVMHEALHAHYTQKSLSLSPGK

SEQ ID NO: 327 - protein, 404 aa, Artificial Sequence
  Amino acid sequence of Chimera A-E57V-Fc(g1S N434A)
ETFPPKYLHYDEETSHQLLCDKCPPGTYLKQHCTAKWKTVCAPCPPRHYTQFWNYLVRCRYCNVLCGEREEEARACHATHNRACRCRTGFFAHAGFCLEHASCPPGAGVIAPGTPSQNTQCQPCPDGFFSNETSSKAPCRKHTNCSVFGLLLTQKGNATHDNICSGNSESTQKPKSSDKTHTCPPCPAPELLGGPSVFLFPPKPKDTLMISRTPEVTCVVVDVSHEDPEVKFNWYVDGVEVHNAKTKPREEQYNSTYRVVSVLTVLHQDWLNGKEYKCKVSNKALPAPIEKTISKAKGQPREPQVYTLPPSRDELTKNQVSLTCLVKGFYPSDIAVEWESNGQPENNYKTTPPVLDSDGSFFLYSKLTVDKSRWQQGNVFSCSVMHEALHAHYTQKSLSLSPGK

SEQ ID NO: 328 - protein, 404 aa, Artificial Sequence
  Amino acid sequence of Chimera A-E57K_R58D-Fc(g1S N434A)
ETFPPKYLHYDEETSHQLLCDKCPPGTYLKQHCTAKWKTVCAPCPPRHYTQFWNYLKDCRYCNVLCGEREEEARACHATHNRACRCRTGFFAHAGFCLEHASCPPGAGVIAPGTPSQNTQCQPCPDGFFSNETSSKAPCRKHTNCSVFGLLLTQKGNATHDNICSGNSESTQKPKSSDKTHTCPPCPAPELLGGPSVFLFPPKPKDTLMISRTPEVTCVVVDVSHEDPEVKFNWYVDGVEVHNAKTKPREEQYNSTYRVVSVLTVLHQDWLNGKEYKCKVSNKALPAPIEKTISKAKGQPREPQVYTLPPSRDELTKNQVSLTCLVKGFYPSDIAVEWESNGQPENNYKTTPPVLDSDGSFFLYSKLTVDKSRWQQGNVFSCSVMHEALHAHYTQKSLSLSPGK

SEQ ID NO: 329 - protein, 404 aa, Artificial Sequence
  Amino acid sequence of Chimera A-E57K_R58E-Fc(g1S N434A)
ETFPPKYLHYDEETSHQLLCDKCPPGTYLKQHCTAKWKTVCAPCPPRHYTQFWNYLKECRYCNVLCGEREEEARACHATHNRACRCRTGFFAHAGFCLEHASCPPGAGVIAPGTPSQNTQCQPCPDGFFSNETSSKAPCRKHTNCSVFGLLLTQKGNATHDNICSGNSESTQKPKSSDKTHTCPPCPAPELLGGPSVFLFPPKPKDTLMISRTPEVTCVVVDVSHEDPEVKFNWYVDGVEVHNAKTKPREEQYNSTYRVVSVLTVLHQDWLNGKEYKCKVSNKALPAPIEKTISKAKGQPREPQVYTLPPSRDELTKNQVSLTCLVKGFYPSDIAVEWESNGQPENNYKTTPPVLDSDGSFFLYSKLTVDKSRWQQGNVFSCSVMHEALHAHYTQKSLSLSPGK

SEQ ID NO: 330 - protein, 404 aa, Artificial Sequence
  Amino acid sequence of Chimera A-E57R_R58D-Fc(g1S N434A)
ETFPPKYLHYDEETSHQLLCDKCPPGTYLKQHCTAKWKTVCAPCPPRHYTQFWNYLRDCRYCNVLCGEREEEARACHATHNRACRCRTGFFAHAGFCLEHASCPPGAGVIAPGTPSQNTQCQPCPDGFFSNETSSKAPCRKHTNCSVFGLLLTQKGNATHDNICSGNSESTQKPKSSDKTHTCPPCPAPELLGGPSVFLFPPKPKDTLMISRTPEVTCVVVDVSHEDPEVKFNWYVDGVEVHNAKTKPREEQYNSTYRVVSVLTVLHQDWLNGKEYKCKVSNKALPAPIEKTISKAKGQPREPQVYTLPPSRDELTKNQVSLTCLVKGFYPSDIAVEWESNGQPENNYKTTPPVLDSDGSFFLYSKLTVDKSRWQQGNVFSCSVMHEALHAHYTQKSLSLSPGK

SEQ ID NO: 331 - protein, 404 aa, Artificial Sequence
  Amino acid sequence of Chimera A-E57K-Fc(g1S LALAGANA)
ETFPPKYLHYDEETSHQLLCDKCPPGTYLKQHCTAKWKTVCAPCPPRHYTQFWNYLKRCRYCNVLCGEREEEARACHATHNRACRCRTGFFAHAGFCLEHASCPPGAGVIAPGTPSQNTQCQPCPDGFFSNETSSKAPCRKHTNCSVFGLLLTQKGNATHDNICSGNSESTQKPKSSDKTHTCPPCPAPEAAGAPSVFLFPPKPKDTLMISRTPEVTCVVVDVSHEDPEVKFNWYVDGVEVHNAKTKPREEQYNSTYRVVSVLTVLHQDWLNGKEYKCKVSNKALPAPIEKTISKAKGQPREPQVYTLPPSRDELTKNQVSLTCLVKGFYPSDIAVEWESNGQPENNYKTTPPVLDSDGSFFLYSKLTVDKSRWQQGNVFSCSVMHEALHAHYTQKSLSLSPGK

SEQ ID NO: 332 - protein, 404 aa, Artificial Sequence
  Amino acid sequence of Chimera A-E57L-Fc(g1S LALAGANA)
ETFPPKYLHYDEETSHQLLCDKCPPGTYLKQHCTAKWKTVCAPCPPRHYTQFWNYLLRCRYCNVLCGEREEEARACHATHNRACRCRTGFFAHAGFCLEHASCPPGAGVIAPGTPSQNTQCQPCPDGFFSNETSSKAPCRKHTNCSVFGLLLTQKGNATHDNICSGNSESTQKPKSSDKTHTCPPCPAPEAAGAPSVFLFPPKPKDTLMISRTPEVTCVVVDVSHEDPEVKFNWYVDGVEVHNAKTKPREEQYNSTYRVVSVLTVLHQDWLNGKEYKCKVSNKALPAPIEKTISKAKGQPREPQVYTLPPSRDELTKNQVSLTCLVKGFYPSDIAVEWESNGQPENNYKTTPPVLDSDGSFFLYSKLTVDKSRWQQGNVFSCSVMHEALHAHYTQKSLSLSPGK

SEQ ID NO: 333 - protein, 404 aa, Artificial Sequence
  Amino acid sequence of Chimera A-E57R-Fc(g1S LALAGANA)
ETFPPKYLHYDEETSHQLLCDKCPPGTYLKQHCTAKWKTVCAPCPPRHYTQFWNYLRRCRYCNVLCGEREEEARACHATHNRACRCRTGFFAHAGFCLEHASCPPGAGVIAPGTPSQNTQCQPCPDGFFSNETSSKAPCRKHTNCSVFGLLLTQKGNATHDNICSGNSESTQKPKSSDKTHTCPPCPAPEAAGAPSVFLFPPKPKDTLMISRTPEVTCVVVDVSHEDPEVKFNWYVDGVEVHNAKTKPREEQYNSTYRVVSVLTVLHQDWLNGKEYKCKVSNKALPAPIEKTISKAKGQPREPQVYTLPPSRDELTKNQVSLTCLVKGFYPSDIAVEWESNGQPENNYKTTPPVLDSDGSFFLYSKLTVDKSRWQQGNVFSCSVMHEALHAHYTQKSLSLSPGK

SEQ ID NO: 334 - protein, 404 aa, Artificial Sequence
  Amino acid sequence of Chimera A-E57V-Fc(g1S LALAGANA)
ETFPPKYLHYDEETSHQLLCDKCPPGTYLKQHCTAKWKTVCAPCPPRHYTQFWNYLVRCRYCNVLCGEREEEARACHATHNRACRCRTGFFAHAGFCLEHASCPPGAGVIAPGTPSQNTQCQPCPDGFFSNETSSKAPCRKHTNCSVFGLLLTQKGNATHDNICSGNSESTQKPKSSDKTHTCPPCPAPEAAGAPSVFLFPPKPKDTLMISRTPEVTCVVVDVSHEDPEVKFNWYVDGVEVHNAKTKPREEQYNSTYRVVSVLTVLHQDWLNGKEYKCKVSNKALPAPIEKTISKAKGQPREPQVYTLPPSRDELTKNQVSLTCLVKGFYPSDIAVEWESNGQPENNYKTTPPVLDSDGSFFLYSKLTVDKSRWQQGNVFSCSVMHEALHAHYTQKSLSLSPGK

SEQ ID NO: 335 - protein, 404 aa, Artificial Sequence
  Amino acid sequence of Chimera A-E57K_R58D-Fc(g1S LALAGANA)
ETFPPKYLHYDEETSHQLLCDKCPPGTYLKQHCTAKWKTVCAPCPPRHYTQFWNYLKDCRYCNVLCGEREEEARACHATHNRACRCRTGFFAHAGFCLEHASCPPGAGVIAPGTPSQNTQCQPCPDGFFSNETSSKAPCRKHTNCSVFGLLLTQKGNATHDNICSGNSESTQKPKSSDKTHTCPPCPAPEAAGAPSVFLFPPKPKDTLMISRTPEVTCVVVDVSHEDPEVKFNWYVDGVEVHNAKTKPREEQYNSTYRVVSVLTVLHQDWLNGKEYKCKVSNKALPAPIEKTISKAKGQPREPQVYTLPPSRDELTKNQVSLTCLVKGFYPSDIAVEWESNGQPENNYKTTPPVLDSDGSFFLYSKLTVDKSRWQQGNVFSCSVMHEALHAHYTQKSLSLSPGK

SEQ ID NO: 336 - protein, 404 aa, Artificial Sequence
  Amino acid sequence of Chimera A-E57K_R58E-Fc(g1S LALAGANA)
ETFPPKYLHYDEETSHQLLCDKCPPGTYLKQHCTAKWKTVCAPCPPRHYTQFWNYLKECRYCNVLCGEREEEARACHATHNRACRCRTGFFAHAGFCLEHASCPPGAGVIAPGTPSQNTQCQPCPDGFFSNETSSKAPCRKHTNCSVFGLLLTQKGNATHDNICSGNSESTQKPKSSDKTHTCPPCPAPEAAGAPSVFLFPPKPKDTLMISRTPEVTCVVVDVSHEDPEVKFNWYVDGVEVHNAKTKPREEQYNSTYRVVSVLTVLHQDWLNGKEYKCKVSNKALPAPIEKTISKAKGQPREPQVYTLPPSRDELTKNQVSLTCLVKGFYPSDIAVEWESNGQPENNYKTTPPVLDSDGSFFLYSKLTVDKSRWQQGNVFSCSVMHEALHAHYTQKSLSLSPGK

SEQ ID NO: 337 - protein, 404 aa, Artificial Sequence
  Amino acid sequence of Chimera A-E57R_R58D-Fc(g1S LALAGANA)
ETFPPKYLHYDEETSHQLLCDKCPPGTYLKQHCTAKWKTVCAPCPPRHYTQFWNYLRDCRYCNVLCGEREEEARACHATHNRACRCRTGFFAHAGFCLEHASCPPGAGVIAPGTPSQNTQCQPCPDGFFSNETSSKAPCRKHTNCSVFGLLLTQKGNATHDNICSGNSESTQKPKSSDKTHTCPPCPAPEAAGAPSVFLFPPKPKDTLMISRTPEVTCVVVDVSHEDPEVKFNWYVDGVEVHNAKTKPREEQYNSTYRVVSVLTVLHQDWLNGKEYKCKVSNKALPAPIEKTISKAKGQPREPQVYTLPPSRDELTKNQVSLTCLVKGFYPSDIAVEWESNGQPENNYKTTPPVLDSDGSFFLYSKLTVDKSRWQQGNVFSCSVMHEALHAHYTQKSLSLSPGK

SEQ ID NO: 338 - DNA, 711 bp, Artificial Sequence
  CDS (1)..(711)
  Nucleotide sequence of Fc(IEGRMD g1S)
atcgaggggcgcatggatcccaaatcttccgacaaaactcacacatgcccaccgtgcccagcacctgaactcctggggggaccgtcagtcttcctcttccccccaaaacccaaggacaccctcatgatctcccggacccctgaggtcacatgcgtggtggtggacgtgagccacgaagaccctgaggtcaagttcaactggtacgtggacggcgtggaggtgcataatgccaagacaaagccgcgggaggagcagtacaacagcacgtaccgtgtggtcagcgtcctcaccgtcctgcaccaggactggctgaatggcaaggagtacaagtgcaaggtctccaacaaagccctcccagcccccatcgagaaaaccatctccaaagccaaagggcagccccgagaaccacaggtgtacaccctgcccccatcccgggatgagctgaccaagaaccaggtcagcctgacctgcctggtcaaaggcttctatcccagcgacatcgccgtggagtgggagagcaatgggcagccggagaacaactacaagaccacgcctcccgtgctggactccgacggctccttcttcctctacagcaagctcaccgtggacaagagcaggtggcagcaggggaacgtcttctcatgctccgtgatgcatgaggctctgcacaaccactacacgcagaagagcctctccctgtctccgggtaaa

SEQ ID NO: 339 - protein, 237 aa, Artificial Sequence
  Amino acid sequence of Fc(IEGRMD g1S)
IEGRMDPKSSDKTHTCPPCPAPELLGGPSVFLFPPKPKDTLMISRTPEVTCVVVDVSHEDPEVKFNWYVDGVEVHNAKTKPREEQYNSTYRVVSVLTVLHQDWLNGKEYKCKVSNKALPAPIEKTISKAKGQPREPQVYTLPPSRDELTKNQVSLTCLVKGFYPSDIAVEWESNGQPENNYKTTPPVLDSDGSFFLYSKLTVDKSRWQQGNVFSCSVMHEALHNHYTQKSLSLSPGK

SEQ ID NO: 340 - protein, 508 aa, Artifical Sequence
  Amino acid sequence of R218Q-Fc
VAETPTYPWRDAETGERLVCAQCPPGTFVQRPCRRDSPTTCGPCPPRHYTQFWNYLERCRYCNVLCGEREEEARACHATHNRACRCRTGFFAHAGFCLEHASCPPGAGVIAPGTPSQNTQCQPCPPGTFSASSSSSEQCQPHRNCTALGLALNVPGSSSHDTLCTSCTGFPLSTRVPGAEECERAVIDFVAFQDISIKRLQRLLQALEAPEGWGPTPQAGRAALQLKLRRRLTELLGAQDGALLVRLLQALRVARMPGLERSVRERFLPVHIEGRMDPKSSDKTHTCPPCPAPELLGGPSVFLFPPKPKDTLMISRTPEVTCVVVDVSHEDPEVKFNWYVDGVEVHNAKTKPREEQYNSTYRVVSVLTVLHQDWLNGKEYKCKVSNKALPAPIEKTISKAKGQPREPQVYTLPPSRDELTKNQVSLTCLVKGFYPSDIAVEWESNGQPENNYKTTPPVLDSDGSFFLYSKLTVDKSRWQQGNVFSCSVMHEALHNHYTQKSLSLSPGK

SEQ ID NO: 341 - DNA, 528 bp, Artificial
  CDS (1)..(528)
  Nucleotide sequence of FLAG-cynoLIGHT
gactacaaagacgatgacgacaaggacggacacggaggctcctgggagcagctgatacaagagcgaaggtctcaccagaataacccagcagcacatctcacaggggccaactccagcttgacgggcagcgggggaccgctgctatgggagacccagctgggcctggccttcctgaggggcctcgactaccacgatggggcccttgtggccaacaaggctggctactactacatctactccaaggtgcagctgggcggtgtgggctgcccgctgggcctggccagcaccatcacccacggcctctacaagcgcacgccccgctaccccgaggagctggagctgttggtcagccagcagtcaccctgcggacgggccaccagcaactcccgcgtctggtgggacagcagcttcctgggtggtgtggtgcacctggaggttggggaggaggtggtcgtccgtgtgctggatgagcgcctggtccgactgcgtgatggcacccggtcttacttcggggctttcatggtgtga

SEQ ID NO: 342 - protein, 175 aa, Artificial
  Amino acid sequence of FLAG-cynoLIGHT
DYKDDDDKDGHGGSWEQLIQERRSHQNNPAAHLTGANSSLTGSGGPLLWETQLGLAFLRGLDYHDGALVANKAGYYYIYSKVQLGGVGCPLGLASTITHGLYKRTPRYPEELELLVSQQSPCGRATSNSRVWWDSSFLGGVVHLEVGEEVVVRVLDERLVRLRDGTRSYFGAFMV

SEQ ID NO: 343 - DNA, 666 bp, Artificial
  CDS (1)..(666)
  Nucleotide sequence of a synthetic construct obtained by deleting a cleavage site and an intracellula r proline-rich domain from FasL and insert a FLAG tag into N-terminus of FasL
gactacaaggacgacgatgacaagcagcagcccttcaattaccccctgaagaagagagggaaccacagcacaggcctgtgtctccttgtgatgtttttcatggttctggttgccttggtaggattgggcctggggatgtttcagctcttccacctacagaaggagctggcagaactccgagagtctaccagccagatgcacacagcatcatctttgggccaccccagtccaccccctgaaaaaaaggagctgaggaaagtggcccatttaacaggcaagtccaactcaaggtccatgcctctggaatgggaagacacctatggaattgtcctgctttctggagtgaagtataagaagggtggccttgtgatcaatgaaactgggctgtactttgtatattccaaagtatacttccggggtcaatcttgcaacaacctgcccctgagccacaaggtctacatgaggaactctaagtatccccaggatctggtgatgatggaggggaagatgatgagctactgcactactgggcagatgtgggcccgcagcagctacctgggggcagtgttcaatcttaccagtgctgatcatttatatgtcaacgtatctgagctctctctggtcaattttgaggaatctcagacgtttttcggcttatataagctc

SEQ ID NO: 344 - protein, 222 aa, Artificial
  Amino acid sequence of a synthetic construct obtained by deleting a cleavage site and an intracellula r proline-rich domain from FasL and insert a FLAG tag into N-terminus of FasL
DYKDDDDKQQPFNYPLKKRGNHSTGLCLLVMFFMVLVALVGLGLGMFQLFHLQKELAELRESTSQMHTASSLGHPSPPPEKKELRKVAHLTGKSNSRSMPLEWEDTYGIVLLSGVKYKKGGLVINETGLYFVYSKVYFRGQSCNNLPLSHKVYMRNSKYPQDLVMMEGKMMSYCTTGQMWARSSYLGAVFNLTSADHLYVNVSELSLVNFEESQTFFGLYKL

SEQ ID NO: 345 - DNA, 516 bp, Artificial
  CDS (1)..(516)
  Nucleotide sequence of S195-His6
gtagcagagacacccacctatccatggagggacgctgagaccggtgagcggctcgtttgcgcccaatgtccaccagggaccttcgttcagcggccctgccgacgggacagtccaacaacatgtggcccttgtcctccccgccactacactcagttctggaactacctggagcgctgtcgctactgcaatgtgctgtgtggggaacgcgaggaggaggctcgcgcttgtcatgccactcacaatcgcgcctgtcgctgtcgcactggcttcttcgcccatgccggcttctgtctggagcatgcctcctgtcctcctggggctggcgtgatcgctcctgggactccctcccagaacactcagtgtcagccctgccctcccggcactttttctgcctcttccagttcatcagagcaatgccagcctcacagaaactgtaccgctctggggctcgccctgaatgtccccggctcttcaagtcacgataccctgtgcaccagccatcatcatcatcatcat

SEQ ID NO: 346 - protein, 172 aa, Artificial
  Amino acid sequence of S195-His6
VAETPTYPWRDAETGERLVCAQCPPGTFVQRPCRRDSPTTCGPCPPRHYTQFWNYLERCRYCNVLCGEREEEARACHATHNRACRCRTGFFAHAGFCLEHASCPPGAGVIAPGTPSQNTQCQPCPPGTFSASSSSSEQCQPHRNCTALGLALNVPGSSSHDTLCTSHHHHHH

SEQ ID NO: 347 - DNA, 537 bp, Artificial
  CDS (1)..(537)
  Nucleotide sequence of Chimera A-His6
gagactttcccccccaagtatctgcactatgatgaggagacttcccatcagctgctgtgtgacaagtgtccccccgggacctatctgaagcagcattgtactgccaagtggaagactgtgtgtgctccttgtcctccccgccactacactcagttctggaactacctggagcgctgtcgctactgcaatgtgctgtgtggggaacgcgaggaggaggctcgcgcttgtcatgccactcacaatcgcgcctgtcgctgtcgcactggcttcttcgcccatgccggcttctgtctggagcatgcctcctgtcctcctggggctggcgtgatcgctcctgggactccctcccagaacactcagtgtcagccctgtcccgatggcttcttctccaatgagacttcctccaaggccccctgtcgcaagcacaccaactgttccgtgttcgggctgctgctgactcagaaggggaatgccactcacgacaacatctgttccgggaactccgagtccactcagaagcatcatcatcatcatcat

SEQ ID NO: 348 - protein, 179 aa, Artificial
  Amino acid sequence of Chimera A-His6
ETFPPKYLHYDEETSHQLLCDKCPPGTYLKQHCTAKWKTVCAPCPPRHYTQFWNYLERCRYCNVLCGEREEEARACHATHNRACRCRTGFFAHAGFCLEHASCPPGAGVIAPGTPSQNTQCQPCPDGFFSNETSSKAPCRKHTNCSVFGLLLTQKGNATHDNICSGNSESTQKHHHHHH

SEQ ID NO: 349 - DNA, 537 bp, Artificial
  CDS (1)..(537)
  Nucleotide sequence of Chimera A-E57K-His6
gagactttcccccccaagtatctgcactatgatgaggagacttcccatcagctgctgtgtgacaagtgtccccccgggacctatctgaagcagcattgtactgccaagtggaagactgtgtgtgctccttgtcctccccgccactacactcagttctggaactacctgaagcgctgtcgctactgcaatgtgctgtgtggggaacgcgaggaggaggctcgcgcttgtcatgccactcacaatcgcgcctgtcgctgtcgcactggcttcttcgcccatgccggcttctgtctggagcatgcctcctgtcctcctggggctggcgtgatcgctcctgggactccctcccagaacactcagtgtcagccctgtcccgatggcttcttctccaatgagacttcctccaaggccccctgtcgcaagcacaccaactgttccgtgttcgggctgctgctgactcagaaggggaatgccactcacgacaacatctgttccgggaactccgagtccactcagaagcatcatcatcatcatcat

SEQ ID NO: 350 - protein, 179 aa, Artificial
  Amino acid sequence of Chimera A-E57K-His6
ETFPPKYLHYDEETSHQLLCDKCPPGTYLKQHCTAKWKTVCAPCPPRHYTQFWNYLKRCRYCNVLCGEREEEARACHATHNRACRCRTGFFAHAGFCLEHASCPPGAGVIAPGTPSQNTQCQPCPDGFFSNETSSKAPCRKHTNCSVFGLLLTQKGNATHDNICSGNSESTQKHHHHHH

SEQ ID NO: 351 - DNA, 537 bp, Artificial
  CDS (1)..(537)
  Nucleotide sequence of Chimera A-E57K_R58E-His6
gagactttcccccccaagtatctgcactatgatgaggagacttcccatcagctgctgtgtgacaagtgtccccccgggacctatctgaagcagcattgtactgccaagtggaagactgtgtgtgctccttgtcctccccgccactacactcagttctggaactacctgaaggagtgtcgctactgcaatgtgctgtgtggggaacgcgaggaggaggctcgcgcttgtcatgccactcacaatcgcgcctgtcgctgtcgcactggcttcttcgcccatgccggcttctgtctggagcatgcctcctgtcctcctggggctggcgtgatcgctcctgggactccctcccagaacactcagtgtcagccctgtcccgatggcttcttctccaatgagacttcctccaaggccccctgtcgcaagcacaccaactgttccgtgttcgggctgctgctgactcagaaggggaatgccactcacgacaacatctgttccgggaactccgagtccactcagaagcatcatcatcatcatcat

SEQ ID NO: 352 - protein, 179 aa, Artificial
  Amino acid sequence of Chimera A-E57K_R58E-His6
ETFPPKYLHYDEETSHQLLCDKCPPGTYLKQHCTAKWKTVCAPCPPRHYTQFWNYLKECRYCNVLCGEREEEARACHATHNRACRCRTGFFAHAGFCLEHASCPPGAGVIAPGTPSQNTQCQPCPDGFFSNETSSKAPCRKHTNCSVFGLLLTQKGNATHDNICSGNSESTQKHHHHHH

SEQ ID NO: 353 - DNA, 519 bp, Artificial
  CDS (1)..(519)
  Optimized nucleotide sequence of Chimera A
gagactttcccccccaagtatctgcactatgatgaggagacttcccatcagctgctgtgtgacaagtgtccccccgggacctatctgaagcagcattgtactgccaagtggaagactgtgtgtgctccttgtcctccccgccactacactcagttctggaactacctggagcgctgtcgctactgcaatgtgctgtgtggggaacgcgaggaggaggctcgcgcttgtcatgccactcacaatcgcgcctgtcgctgtcgcactggcttcttcgcccatgccggcttctgtctggagcatgcctcctgtcctcctggggctggcgtgatcgctcctgggactccctcccagaacactcagtgtcagccctgtcccgatggcttcttctccaatgagacttcctccaaggccccctgtcgcaagcacaccaactgttccgtgttcgggctgctgctgactcagaaggggaatgccactcacgacaacatctgttccgggaactccgagtccactcagaag

SEQ ID NO: 354 - DNA, 519 bp, Artificial
  CDS (1)..(519)
  Optimized nucleotide sequence of Chimera A-E57K
gagactttcccccccaagtatctgcactatgatgaggagacttcccatcagctgctgtgtgacaagtgtccccccgggacctatctgaagcagcattgtactgccaagtggaagactgtgtgtgctccttgtcctccccgccactacactcagttctggaactacctgaagcgctgtcgctactgcaatgtgctgtgtggggaacgcgaggaggaggctcgcgcttgtcatgccactcacaatcgcgcctgtcgctgtcgcactggcttcttcgcccatgccggcttctgtctggagcatgcctcctgtcctcctggggctggcgtgatcgctcctgggactccctcccagaacactcagtgtcagccctgtcccgatggcttcttctccaatgagacttcctccaaggccccctgtcgcaagcacaccaactgttccgtgttcgggctgctgctgactcagaaggggaatgccactcacgacaacatctgttccgggaactccgagtccactcagaag

SEQ ID NO: 355 - DNA, 519 bp, Artificial
  CDS (1)..(519)
  Optimized nucleotide sequence of Chimera A-E57K_R58E
gagactttcccccccaagtatctgcactatgatgaggagacttcccatcagctgctgtgtgacaagtgtccccccgggacctatctgaagcagcattgtactgccaagtggaagactgtgtgtgctccttgtcctccccgccactacactcagttctggaactacctgaaggagtgtcgctactgcaatgtgctgtgtggggaacgcgaggaggaggctcgcgcttgtcatgccactcacaatcgcgcctgtcgctgtcgcactggcttcttcgcccatgccggcttctgtctggagcatgcctcctgtcctcctggggctggcgtgatcgctcctgggactccctcccagaacactcagtgtcagccctgtcccgatggcttcttctccaatgagacttcctccaaggccccctgtcgcaagcacaccaactgttccgtgttcgggctgctgctgactcagaaggggaatgccactcacgacaacatctgttccgggaactccgagtccactcagaag

1-6. (canceled)

7. A DcR3 variant comprising a first chimeric cysteine-rich region or a second chimeric cysteine-rich region, wherein:
the first chimeric cysteine-rich region consists of an amino acid sequence obtained by introducing into a cysteine-rich domain (hereinafter abbreviated as CRD) of wild-type DcR3, substitution of at least a part of the cysteine-rich domain of the wild-type DcR3 with at least a part of a cysteine-rich domain of a TNF receptor superfamily molecule other than DcR3; and
the second chimeric cysteine-rich region consists of an amino acid sequence obtained by introducing into the amino acid sequence of the first chimeric cysteine-rich region, deletion, substitution, insertion or addition of 1 to 30 amino acids.

8. The DcR3 variant according to claim 7, wherein the DcR3 variant comprises one or more complex N-glycoside-linked glycans.

9. The DcR3 variant according to claim 7, wherein the DcR3 variant has neutralizing activity to at least one or more of LIGHT, TL1A and FasL;
the DcR3 variant has neutralizing activity to all of LIGHT, TL1A and FasL;
the DcR3 variant has no neutralizing activity to FasL and has neutralizing activity to one or more of LIGHT and TL1A, or
the DcR3 variant has no neutralizing activity to FasL and has neutralizing activity to both of LIGHT and TL1A.

10-12. (canceled)

13. The DcR3 variant according to claim 7, wherein the TNF receptor superfamily molecule is OPG.

14. (canceled)

15. The DcR3 variant according to claim 7, wherein the first chimeric cysteine-rich region comprises one or more substitutions selected from:
substitution of a part of CRD1 of wild-type DcR3 with a part of CRD1 of the TNF receptor superfamily molecule, wherein the part of the CRD1 of the TNF receptor superfamily molecule corresponds to the part of the CRD1 of the wild-type DcR3;
substitution of a whole of the CRD1 of the wild-type DcR3 with a whole of the CRD1 of the TNF receptor superfamily molecule;
substitution of a part of the CRD2 of wild-type DcR3 with a part of CRD2 of the TNF receptor superfamily molecule, wherein the part of the CRD2 of the TNF receptor superfamily molecule corresponds to the part of the CRD2 of the wild-type DcR3;
substitution of a whole of the CRD2 of wild-type DcR3 with a whole of CRD2 of the TNF receptor superfamily molecule;
substitution of a part of the CRD3 of the wild-type DcR3 with a part of CRD3 of the TNF receptor superfamily molecule, wherein the part of the CRD3 of the TNF receptor superfamily molecule corresponds to the part of the CRD3 of the wild-type DcR3;
substitution of a whole of the CRD3 of the wild-type DcR3 with the whole of CRD3 of the TNF receptor superfamily molecule;
substitution of a part of the CRD4 of wild-type DcR3 with a part of CRD4 of the TNF receptor superfamily molecule, wherein the part of the CRD4 of the TNF receptor superfamily molecule corresponds to the part of the CRD4 of the wild-type DcR3; and
substitution of a whole of CRD4 of the wild-type DcR3 with a whole of CRD4 of the TNF receptor superfamily molecule.

16. The DcR3 variant according to claim 15, wherein the part or the whole of the CRD2 and/or the part or the whole of the of the wild-type DcR3 is maintained in the first chimeric cysteine-rich region.

17. (canceled)

18. The DcR3 variant according to claim 15,
wherein the first chimeric cysteine-rich region comprises the following amino acid sequence (a), (b), (c) or (d), and the second chimeric cysteine-rich region comprises the following amino acid sequence (e):
(a) an amino acid sequence obtained by introducing into the amino acid sequence of the cysteine-rich region of the wild-type DcR3, substitution of the CRD1 of the wild-type DcR3 with CRD1 of OPG;
(b) an amino acid sequence obtained by introducing into the amino acid sequence of the cysteine-rich region of the wild-type DcR3, substitution of the CRD4 of the wild-type DcR3 with CRD4 of OPG;
(c) an amino acid sequence obtained by introducing into the amino acid sequence of the cysteine-rich region of the wild-type DcR3, substitution of the CRD1 of the wild-type DcR3 with CRD1 of OPG, and substitution of the CRD4 of the wild-type DcR3 with CRD4 of OPG;
(d) an amino acid sequence obtained by introducing into the amino acid sequence (a), (b) or (c), substitution of a part at positions 103 to 123 from the N-terminus with a corresponding part of an amino acid sequence of a cysteine-rich domain of OPG; and
(e) an amino acid sequence obtained by introducing into the amino acid sequence (a), (b), (c) or (d), deletion, substitution, insertion or addition of 1 to 30 amino acids.

19. The DcR3 variant according to claim 18, wherein:
the amino acid sequence (a) is an amino acid sequence consisting of amino acids at positions 1 to 164 from the N-terminus of the amino acid sequence set forth in SEQ ID NO: 26 or 50;
the amino acid sequence (b) is an amino acid sequence consisting of amino acids at positions 1 to 164 from the N-terminus of the amino acid sequence set forth in SEQ ID NO: 28 or 52;
the amino acid sequence (c) is an amino acid sequence consisting of amino acids at positions 1 to 164 from the N-terminus of the amino acid sequence set forth in SEQ ID NO: 30 or 54; and
the amino acid sequence (d) is an amino acid sequence consisting of amino acids at positions 1 to 164 from the N-terminus of the amino acid sequence set forth in SEQ ID NO: 32 or 56.

20. The DcR3 variant according to claim 18, wherein the amino acid sequence (e) comprises one or two or more substitution selected from the group consisting of:
substitution of Glu at position 57 from the N-terminus of the amino acid sequence (a), (b), (c) or (d) with another amino acid;
substitution of Arg at position 58 from the N-terminus of the amino acid sequence (a), (b), (c) or (d) with another amino acid; and
substitution of Arg at position 60 from the N-terminus of the amino acid sequence (a), (b), (c) or (d) with another amino acid.

21. The DcR3 variant according to claim 18, wherein the amino acid sequence (e) comprises substitution of Glu at position 57 and Arg at position 58 from the N-terminus of the amino acid sequence (a), (b), (c) or (d) with other amino acids.

22. The DcR3 variant according to claim 18, wherein the amino acid sequence (e) comprises one or two or more substitution selected from the group consisting of:
substitution of Glu at position 57 from the N-terminus of the amino acid sequence (a), (b), (c) or (d) with Lys, Leu, Arg, Val, Ala, Phe, His, Ile or Met;
substitution of Arg at position 58 from the N-terminus of the amino acid sequence (a), (b), (c) or (d) with Asp, Glu or Thr; and
substitution of Arg at position 60 from the N-terminus of the amino acid sequence (a), (b), (c) or (d) with Lys.

23. The DcR3 variant according to claim 18, wherein the amino acid sequence (e) comprises substitution of Glu at position 57 from the N-terminus of the amino acid sequence (a), (b), (c) or (d) with Lys, Leu, Arg, Val, Ala, Phe, His, Ile or Met, and substitution of Arg at position 58 from the N-terminus of the amino acid sequence (a), (b), (c) or (d) with Asp, Glu or Thr.

24. The DcR3 variant according to claim 18, wherein the amino acid sequence (e) comprises substitution selected from the following (f) to (i):
(f) substitution of Asn at positions 131 and 144 from the N-terminus of the amino acid sequence (b), (c) or (d) with other amino acids;
(g) substitution of Asn at positions 131, 144 and 157 from the N-terminus of the amino acid sequence (b), (c) or (d) with other amino acids;
(h) substitution of Thr at position 133 and Ser at position 146 from the N-terminus of the amino acid sequence (b), (c) or (d) with other amino acids; and
(i) substitution of Thr at position 133, Ser at position 146 and Thr at position 159 from the N-terminus of the amino acid sequence (b), (c) or (d) with other amino acids.

25. The DcR3 variant according to claim 18, wherein the amino acid sequence (e) comprises substitution selected from the following (f′) to (i′):
(f′) substitution of Asn at positions 131 and 144 from the N-terminus of the amino acid sequence (b), (c) or (d) with Ser;
(g′) substitution of Asn at positions 131, 144 and 157 from the N-terminus of the amino acid sequence (b), (c) or (d) with Ser;
(h′) substitution of Thr at position 133 and Ser at position 146 from the N-terminus of the amino acid sequence (b), (c) or (d) with Ala; and
(i′) substitution of Thr at position 133, Ser at position 146 and Thr at position 159 from the N-terminus of the amino acid sequence (b), (c) or (d) with Ala.

26. The DcR3 variant according to claim 18, wherein the amino acid sequence (e) is an amino acid sequence consisting of amino acids at positions 1 to 164 from the N-terminus of an amino acid sequence set forth in SEQ ID NO: 58, 60, 62, 64, 66, 68, 70, 180, 182, 184, 186, 188, 270, 272, 274, 276, 278, 280, 282, 284 or 286.

27-28. (canceled)

29. The DcR3 variant according to claim 7, wherein the DcR3 variant comprises an Fc region derived from a human IgG1, IgG2 or IgG4 antibody, or a mutated Fc region consisting of an amino acid sequence obtained by introducing into an amino acid sequence of the abovementioned Fc region, deletion, substitution, insertion or addition of one or several amino acids.

30. The DcR3 variant according to claim 29, wherein the Fc region or the mutated Fc region is bound to the C-terminal side of the first or second chimeric cysteine-rich region via another region or a linker.

31. The DcR3 variant according to claim 29, wherein the mutated Fc region comprises one substitution selected from following (A) to (E):
(A) substitution of Cys with Scr at EU-index position 220 of an amino acid sequence of a heavy chain of human IgG1.
(B) substitution of Cys with Ser at EU-index position 220, substitution of Leu with Ala at EU-index position 234, substitution of Leu with Ala at EU-index position 235, and substitution of Gly with Ala at EU-index position 237 of an amino acid sequence of a heavy chain of human IgG1;
(C) substitution of Cys with Ser at EU-index position 220, and substitution of Asn with Ala at EU-index position 434 of an amino acid sequence of a heavy chain of human IgG1;
(D) substitution of Cys with Ser at EU-index position 220, substitution of Met with Tyr at EU-index position 252, substitution of Ser with Thr at EU-index position 254, and substitution of Thr with Glu at EU-index position 256 of an amino acid sequence of a heavy chain of human IgG1;
(E) substitution of Ser with Pro at EU-index position 228, substitution of Leu with Glu at EU-index position 235, and substitution of Arg with Lys at EU-index position 409 of an amino acid sequence of a heavy chain of human IgG4.

32-35. (canceled)

36. The DcR3 variant according to claim 29, wherein the DcR3 variant comprises a mutated Fc region consisting of an amino acid sequence set forth in SEQ ID NO: 72, 74, 156, 158, 160, 162, 164, 166, 311, 312 or 313.

37. The DcR3 variant according to claim 29, wherein the DcR3 variant comprises an amino acid sequence set forth in SEQ ID NO: 76, 78, 80, 82, 84, 86, 88, 90, 92, 94, 96, 98, 150, 168, 170, 172, 174, 176, 178, 190, 192, 194, 196, 198, 200, 202, 204, 206, 208, 210, 212, 214, 216, 218, 220, 222, 224, 226, 228, 230, 232, 234, 236, 238, 240, 242, 244, 246, 248, 250, 252, 254, 256, 258, 260, 262, 264, 266, 268, 288, 290, 292, 294, 296, 298, 300, 302, 304, 314, 315, 316, 317, 318, 319, 320, 321, 322, 323, 324, 325, 326, 327, 328, 329, 330, 331, 332, 333, 334, 335, 336 or 337, or an amino acid sequence obtained by introducing into the abovementioned amino acid sequence, deletion, substitution, insertion or addition of 1 to 30 amino acids.

38-39. (canceled)

40. A DNA encoding the DcR3 variant according to claim 7.

41. A gene recombinant vector comprising the DNA according to claim 40.

42. A transformant obtained by introducing the gene recombinant vector according to claim 41 into a host cell.

43. The transformant according to claim 42, wherein the host cell is a cell derived from a mammal or a CHO cell.

44. (canceled)

45. A method of producing a DcR3 variant or a DcR3 variant composition, wherein the method comprises culturing the transformant according to claim 42 in a medium to generate and accumulate the DcR3 variant variant comprising a first chimeric cysteine-rich region or a second chimeric cysteine-rich region, wherein:
the first chimeric cysteine-rich region consists of an amino acid sequence obtained by introducing into a cysteine-rich domain (hereinafter abbreviated as CRD) of wild-type DcR3, substitution of at least a part of the cysteine-rich domain of the wild-type DcR3 with at least a part of a cysteine-rich domain of a TNF receptor superfamily molecule other than DcR3; and
the second chimeric cysteine-rich region consists of an amino acid sequence obtained by introducing into the amino acid sequence of the first chimeric cysteine-rich region, deletion, substitution, insertion or addition of 1 to 30 amino acids.
and purifying the DcR3 variant from the obtained culture solution.

46. (canceled)

47. A pharmaceutical composition comprising the DcR3 variant composition according to claim 7 as an active ingredient.

48. (canceled)

49. A method of preventing or treating an autoimmune disease, an inflammatory disease or an allergic disease, the method comprising administering the pharmaceutical composition according to claim 47 to a patient in need thereof.
